United States Patent Application Publication US 2023/0313210 A1 - sequence listing, part 2

SEQ ID NO: 18 - DNA, 504351 bp, Pseudomonas sp.
ggcaccaaaaagctgaagtaaccatcacggaagctcaagcgttctcgaaaggagcggcccggcctgaggccgtgcggacctcctgacgtaccggtgtaggcgactcaggcgtacgcgaacgaaaaaaccgcaagaaaagccgcaacgtcgcatctcaagcgggtacgggtggcctgttgatcgtcgtcttgaccagtttgctgtgtaccacgcgttgtaggccaagtcgtcccttcagctgctctgctgtatagagcgcgcgatcatcccacccctcgcgaagaagtcgccgccagacccacgcacgccgtagttcacctgcgggaagcatcaggcctaatctcaagtatcggaaattcttttcaagtgcggcggccttcttcgttacgcccgttagcacttgctagtacgcgatcagattcgtgctgttcaaaggtctgagccagaatgctcggattgataccggagtcgttgctctcaccgcgcgtccagttgacgggcaaggcttattgcacctctagcagcctgatgctttcgctcagtttcatgaaacgcgggatgacatcttccggcggcggcgtcagctctgtcaggtcgtccgtacccttctgaaaggtgaacatctgcaccgcaaatagcggtgagtccgtcccgcctcgatgcgccagggcaaaccaggcccgctcttgttcgccagagcctggcttgggatcaagacgccagccctccagaccagccaggcgtttgccgagttggatgcgttcgatgaaggatgtcttgcgccatttctcggcatcgtagccggggcggtagtcgctgtcgtaagtgccctgcgtgggtctggtctgccaggggtcgttggccgaggcattaatcagggtaaagatcacattgggcgttttggtaaagcgcaggctgttcttgatgctgtaagcggtcttgccatcatcggcgatgaaaccgtaggggaagcagaagcccgggcctttgggtacctcgtaaagttcgcgcggctgaaagcgtgcaatcagcgccttgatacgctcggcggagtcggggccggccttggagaagccgaagtagtagactcgattattacgccaaagcaagacatctgcgggagaaatatcatcccctaggaagtaggcgtcggggatgccgagatcaaattcgtagactttggttaaaggtatctggcgttcgacttcttctatattcttcgcaaacctttctactgcctctctggtcgtttttgtattttcccttatatctagctcttttagttcttcaagcgcatttttttttctggccgcctctttgatcagttcctcttgatacaagctcgccgtacctttgatatatcttgcagcaccatcgaacgtatcacgcccggcaatatcactcactcgaatggtcaggccgtcatagtcataactacccacatcccctttagccgttactttgggggtaaagacatgaccccctcgaccatcagtaatcctgtccgttcgctgagcggaataggtagcccactgcatatcctcaggcacatcgaaggtcatgcgcccaatgcattcctgccgtggctcatcggctattaccaagcctgcagggagcatcagaccgaggcttaggtaacgaaaaaagcttttcatgtgcgacggttctcttcttcacgaccgttatcaacctgcgccaatgcgcgatcggactcgggttgttgaaaggtctgagccagaatgctcaggttgatacccgagtcgttgttctcacccctcgtccagttgacgggcaaggcgcagataaagccctgtacaccaacgggtggcgagaacatcttcacgtcagccagggtattggagcgccagaagcgctcctcatgaggcatgggttccatcagttcaccgccgtgaccgatattcaccagatctcgataagcccaagtcggccaagtagaggctgggaagcctgtctttttaaattgtttcaggtctggtgttttgcgtggttgtacctgactgatgttttgcggaatgaaatcaaaagaactgttgtaaaaatccgtattcgtttgcgcgcgcgcctgtatcgacttccaagtttcctcagcagcaggctgttctagatactgcgccagcccggttgctgtggtgacaccggaggagcctccagccatagacaaaccaaagtgtttcttccatagatcgacccgtaactgatgcacggtcttgccgaccgtgtgttgttgcttgccgtcgagcttggcctgtactggcgtgccatcgcgcacgatgactgccaactctgagtcacgcgtgcccagcaggctacggtcattgatattggcactgccaaggatggccacacggtcgtcggcaatcagcagcttgctgtgcacgtagatctgttcagtcaccacgcgccccttgaggttttcccaggtgcgcaggttgagcagggtcaggtaacggctccagtcctgttgctcataaacgggccggccgctcgcgtccttgtactcgatgatcttgagtgcctcggcgcggttcaccttgcgatccagcagttcgcgcagggccatgcgtttctggatacgtttgatcaggctgttctcgccaaaagccaggctctgcatggtgagcgtgacctgatgcatgatgttgagtacgttcagcgcgccctccggatgcaccggcagaatcatatagacgtgaaacgtccgtttctcatcgatggcacggccaatgcgattggccagggctgcgccgatttcgttgagcaggcccttctgcgcatcgcccagtttatgggtaagccagccctgggcattgacgccccacatggcttgcaggcttttcaggaactggcgcgcctctttactgcgctccttggcgatggcgtcgatttctttccagtccagttgccagatgtcctcggcctccagcgcttcgcgtaggcgcacacgggcaacatagtcctgacgcaggctggcagggtcacgcaagctggccataggcccggaaagcggaacgtcatcgaatatttcgcgcgcctcaccataggcactctgaaaaaactggttctcgatatagatgaagtgctgcgcactggagatggcctgcagcatcgctgccttgcagttggcctgcacgccgccagtgtcgatacctgtcggcaggggcagattcacgcccgccttgctacgcccggcttgctcctgttgggtcatgcggctggaggcactgcgcaaaacctgcacgctcatgccccctggctgtgcgctcggcgccacgggcaatagtgcgagcgcattgatccataccggctgtggcttgggaaagctcaggcgtggggcttcattgaccttgagcctcacgcccaaatgatcaaggcctgtctcactgaccaacgcattgagccagcgcacaaccgcttctaacaggttacgcaccaaggtggtgtcctgcagagctggcgtatcggccaggtaggcctgctgtccgttccagcggtcaatgaagttacgcgccacgtcatagaccgaggggccttcgatacggcaatgcacatcttgccagggcatgcgcggttgatcctccgccaatcgaccattgcccggtgaagccagtggttgcggcttttcatgcaggtaggcgtaaggttccaggtgttgccccgagcgctcctgcagcaagtgatagatgaaccagagcattgagctggccagctcgctggtgctttctcgataggtgctgggaatatcctcgaagctcttgccgctgagcacagtcagaacgcggccgagctcggtctcgctcatccactggctgatcagctcgatactcttgatgcgcaatgactcataaagattgcctgccgcctcacgcagctcctgcaaccacgcttgcagacgcagcttcacttcctcggccatcgggacagtatcaaggttgtcactgatcagcctagccatcccctggatgctttgtataaccatttgccgctggacagcactgagtcgctcaaaaccctcatcgagattttcttcggcactgttcttggcacgatttagccattgcagagcggagaatggagggctgcgaaaaaagtccgcaatacgactcatgccattgagagctgtactccttctaagcggaataaggctggtctcagatacaggcttggacaggtcgaacaacgtggccatcatcagccccattgagctgacatgtttgtccatatccatccagcctaacttcggtagccccggattgtaggcatcgttgccttgcctgttactggcgtccaagctgaagttattgtcatcacgccgcccgtaggccagatcaattcccccgacataggcaatacggttgtcgaccacaaccgatttctggtggtgcgagaacgcaacaccgagccccttcatatcgctttgctgaatggcgggcgtacagaaggcacgagggccgccagccaggcccgcattgagctggaagacggccagcatggtctcgaagtcataagtaccgaggctgccagagggactcaaccagggcatgacataaaccttcaaggctggctggcgcttgagagcctggtgcaggcactgccagagactgcgattgccatcgagcagcacgtcgtagttgacctgccagcccgtgatgaaaatgcattgactagcctggtcgatggaggctgcgacgtccttgaagtaatcactcccggtcgtgaagaaacgaacctgattacccgtgcgtttgggcgcgaacagattcgtcccattcaggaagaagtccggggcggaatacgccgcataggcctttccatcctgggtattgatctggttgagctcctttgcacgaacgccgttgtaggcagagtcagttgccatggccaatcattccttggattgcaggtgggtatagagatcgctggtgcactggctatcctgctggctacgctctttttccagcagcgcattgccggcgtcgttgcggctgatgcaactgctgaaatccagcgcgcccagggcataacgctcgctgttccaaccctgtcgttccagataaatccgcagggctattcgttgaccgggatagctgagccagagacttcttggcgcttggacgtaagccttcgctagctgcttttgctgagcgtcatccagcagagcgcggccatcggcatcggtctctccctgtagcaacacgtcgtcgccctcgccgagttcgatgcgccatggggtatggcccaaggggaacccttcgtcgcctggtacatcctgaagacgaatattgaatcggtactcacgcacctccacaggggccgatttggacaggccgcccggcgcatgttccaacaagctccccgcctggtcgctgtccgcgattcccggaagcaccggtgacttgatcttgatgcccgagccctttcccggtgagccgccggcattgatcctggccagcgggccggaaagggtgatgccgcccgggtcgagcctgacgaagctgccaccggccacgagggtcagctcgatgccggcttcaatgaccattttctggccggccttgaggtggatctcccgaccggctttggtcagctgggcagtgccgagcctgatgtgctggttctggccgacagtgaggtggtcgtcaggtttgatttcgaccttgcggctaccagcaacggtcaggtgttcatcggccttgagttcgccgtagctgttggcctcgacggtgtcgtggcgctcgtggccgacgcggatcttctggtcgtgctcgatgttctcgtcccagtcgcgctgggcatgcaggtaaatctgctcggcgcctttgcggtcttcgatgcgcaattcgttgtaaccgccgccgccgggtgagctcagggttttgaaaacgctgcgggtcttgtttgccggcagatcgtaggggaccttgtgctcggcatggtagaggcagccggtcaccaggggttggtcggggtcagcttcgagaaaggtgaccagcacctccatgccgacgcgcggaatggcgataccgccgtagccgtctcctgcccagctgttggagacacgcagccaacagctggtcttgtcgtccgcttggccttcacggtcccaggaaaactgcacttttacccgaccgtgctcatcgcaatggatctcctcgccggtcggtccggtgacgacggcggtctgggcgccaagcacgcgaggcttcggatggttcagggcgggccggtagggaacatcccatggagtcgcgacaaagcggttgcgatagccctggacgaagcgatcagtcgttgaactcaggtttgagtccgattgattcgtatggtcgcgcccgtgctgacgtgagctattggtaatcgactcctctagcacctgcggctgcttaccttcgtggaacacctcggttagcagccagaggtcgttccattcctggcggggatggtcggagatttccaacaggtaaccgctgacgagtgcgggctggtcgctgcggccttcagcccgctgatagtcggcacggtggcgttccagggcacgctgagagagatgcttgccgcgggtgcgatccgtgaagcgccccgggtagtcataatcttccaggtcaggttctggtgcgctctgctgttcggaacccttgtggctggcttccataaccaggcgcggctgctcgaagtcgtagtcgcgtcggctgacgcggttggtacgggtctccaggcggacggcaaagcgcttgatcactggctcgtcggcgaccagcccgctgtcctgcaggtaggcggtgggttggccgagcttggaaaagctcgtctggtcgtcgccgaacaccagggtatggccctgcgcgctgtgctcgaagtgatagtggatgccttcttcctcacacaggcgctggatgaaatgcaggtcggtctcgtcgtactgagtgcagtagtcgcgctcggggtagaccaccgggccgagttgaaaacgataggcatccgcctggataccctgaccttcgagcacttgggcaatgatgtgtggcacgctcaggtgctggaaaatgcgctgatcggtgcggtgcgccagataggccagttgcggaacgagggtcacatggtagcgagtcagacgcttgccggactcgccctgtgcgacgcgatgaatcaagccgtgaatgccattgccggccggagagagcgccaggaatgcaggcttgtgcagcaggctttgcaggtccagatcaggacattcgctgaccagctccagatcgaagcgatagggttggctgatggcttcgcgcccgctgaacgcaagcacctgcaggtcgtgctcgatgccatcgatggtgaggctgaagtgggtgtcgttggccgcgttgaacatggcgcttccttgttctcgtgtcatccatgggtgcgcccgaaccagcgctgcaggcggctgggtgcggggcgacgaaaaatatccagtaattgggtcaagtgggcggtgcgcttattggcatcgaacgccagcgctgcgcgcagtgtgggccagccataagccaggttcggcggtcgacgcagctccttgtccagcgccatcgcttttgcctgcttggcactcagacgccggaacgggtggcgtccgctggccatctcatacagcaggcagccaagcgcatacacatcgctggcctccgaaggctccgctccgtcaaggagttcaggggcggcatagcgcgtggtccaggccttgaatcggttgcgagacagccgcggcagatttttcagcacgccctcgagcggctgaccgaggccgtagtcgaacaagcgcagcccatcctccgcgagtattacgttgctgggtttgaggtcgccgtgaatgacgccgcggctatgggaataggccaacgcctctatcaaaggcaccgcgatttcgcacaactcgccccaggcgaggccattgggacgctcgctgagcaactggtcgagcgtcggtcccttgagcaactcgagggtaatgaaggcgcgctggctgtccgcgtccacgtcgaagccatacagccgcacgacatggcgatgactcagccgtgcggtcagcgcgaattcggtgtagagcagcgcatgggcgtcggggtactcggcgaaatcatcgctcagggttttcaacgcaatatagggttccggatcgccgaactgttcgcgtagcaggtcccgtgcgcggtagacggcccccatgccgccgacaccgagcagtcgttcggccaggtaacgtccgcccaagaccttcggtagctcaccggtactggtggccggtggtgccgcaggggccggcgcagcagcggtggcggcgaaggcgaagtaggtcagatccgaagccggttcggcgcacaggggctcgttcatcggcgtactaccactgcgctgaggttgtcccgtgccggaccgtccatgacgtgatcgaacagccgttgcagcgcaagcgtggtcgacggcgaattgagtgctgcacccaacgcgtccggcgacaggctctggtagagcccgtcgctgcacagcagcaaggtatcgcctggatagacatcgaactcgagaatatccagcaccagttgctcactggcgccgatcgcgcgagtgagtgcatgcgcagcagggtgacgcgcggcctcctgcgggctgaggttctgttcgtcgatcagctgctgcagcagcgagtggtcacgcgagagctggtaaagccgtccgcggcgccagaggtagcagcggctgtcgccagcccagacgcaggcggcgcggtcggcctccatcagcagcgcgaccacagtactgccggtcaccgggtcggggcggtcggcggtgaccgtcagttcctggccgagtctgcgattgaggtcgtgcaggcagcggcgcaggttagccagacgttcggccaggttaccttccggcagctcggccagttgctcgacaatcaagcggctggccaacgcaccgttgtggtggccgcccattccatcggcgaccacccacaggccttgctcgggcaggtcgagaaaggcgtcttcattgcgtgcgcgaaccttgccaatgtcggttcgcgcggcgctacgccagtcctgggccaggcttgcggtgcgcatcatcacagggtcgccggcagcttgaagtcacgcagcaaggcgatgtcgaacggattcggcgagcgctggctgtgcagcagatagttggcgtgacggccgcccagattggccttgagcatcagcacgtcacggccgctgtggtagtcgacctgcatcaggtccagcaggcggaacagagaccaagggccggtattcttctcgatcccgacacgatgcccgccgagctcttcgactaccaggctggtgcgaccgtcctccgcatcggctggccagctgaaggcggtctgcacgatcgggccgtggcggtactccatctgctgattgccgaagcggaagtcggcgcgacccaggctcgaatccagcgagtaaggctcgagcttgaagcgaatctgcggctcgttcgggttgtcagcgaagaagctgcggcggatggtttgcgcgttgcccatctgcgagaggaattcgcgtgacaggggcaagccgcgaccatcgactcgacggagctgatattggccagcgctgccactgacgaacgctttcagatagcgatcgaagaacccgtccgcaacgccttgcgccttgaagaactcgcggaagtcggcgatggcgacgtcactttcgctgtgggcgctgaatggatagcgttggcgcagcgagcccttgtagaacgcgtacagctcgctctggtagcgctggttgaggtagtggtaggcgtcgttcagaaccagcgtccagctgtcttcggcgagcaggccgagccagttgccgatcggttgtggcagacgggctgcgctggcgcgcaactggttgatggcgtcacgttgaccgcccatgcgtgccttggcgagttcgaacgcagcctgatcgggcgcactggcgtgggccagggcagccaattgcagttgaagggcatcgagcgcctgcagcgtagggaccagctcggcactggcgcctgcattttcgtcgagcaggcggtgcagcggttcgaagcggcgctcgagcgtcttgcgcgccgtgtcaggcaggttcttggccagtgcggcctgagcctgctcggcggcggccgatgccaacttggcggctttgcctagtttgccgttggcgtcggcggtttctgcagcatcacctgcggtgtcagccgcgccgacaaagcgggtgttgtcgcgtatctcgaccagtaattgcagcaacggcgagttggctgcgctcaacccgctgagcaatgccgagccctgaccggtaccggcgatcggctccagcgccagttgcgcgactgcttcgctccagtagttggcgtagtcgcgaaaatagagctgctccatctcgaccatcaggcgtcctagatccttcaggcttaggctgtcgccttcgccgagcacccagttgtcgcgcaggatctcgcgcaccaggtcgctgccctgtgcgacgtagaacttctgataaccgttttgcgtatagaacccggggatggcgtagtcgctgccgctgaacagcgcgccctgaggcccgagacgttggctgaagcgatagtcgggtaggctgcgagcctggtcgcgcagcatgcggtagacgacgttggccagtgattcgctgcgcagcacctgacgtgcctcggcgacgagctgatcgttgagcgcatagggcgcgaagccgtcattgagcatccgctcgaaatgggtgttgagcccgttctgtgcgaccgcattgccggcgtagcgcagcgaccagtcggcggcgatccagtccttgagaaaaccgtcgtcgcgacgttcttccaggttgagcatcagatatgcgcgcaggctgccgagcaggcgttcacggtcggtgagattggcgcggatctgggcttcgagctgacgcgcaacacgtggcagcagcagagtttccagttcgtgccgataggcttgatgcaaggttggatcgactgcctcgccctggtatagcccgccgcgttgcaggtaagtcacctcggatttgttcggaaatacctgtgtggccgcgtagctggtatccagcgccttgagtatgcgaagtgcatcgtcctgggcagagatgctctggtgctcttgaaccagctgatcggcgaggccgcgcagttgctcgagccgctcgtggttgttggagaagccgtttgcccagagcgcgccgaacagcgccaggcaggcgaagcttgcggcatacagcgcgcgctggccccagtcgatgcggcggacttctttctggtcaagaccggcaaggtcggcctccgggaaaatcacacggctgagcaggtgattgatgaagcgcgcccgaccgctgcggaaggtcggcagcgcgctgctggacagtccgaggttgcggccgatgccactggtaatcgggtcgagctcaccttgcagctgcggtgcgctggtcaggtagaaaccgcgcagctggctggcacgctggtagcggttgccggagaacgccagttcaacgaagaggcacagacgctcgccaatctggccgagctggtgggggaaatcgaggatccggccgcgacgctgggtgtcacgctcctggtgcatgcgcagcacgacctggctgttgagccggcgcagcaattcctcgaattcgctgcgcaccacgttgacgtcggtgccgtcctgttccttgcggaagctggcacccagcacctgatcgctttcttcgcgagatagctgatcgaagaactcgtcgaagccaagcaccttgtccgctttgctcagcaccagatagaccggtacgtcggcgcccaggcgctggtggatttcttgcaggcgttgacggctttgacgtgccagggtttcgagctccagttcgctcgattgcagcagctgctcgaccggaatattgaccagcacgccattgagtgggcgcgcacggcgacgacgcaacaaaccgagcagcgtttcccaggccttgccgtcgacgccggcgtcgggttgagtcaggtagcggccggcggtatcgatcagcacggcatggtcggcgaagtaccagtcagcgtagcgagtgccggagacatccttggtcagacgctggttttcgccgcggttgagcggaaagtccaagccggaaaaatccaacagcgaggtcttgccgctgccttgtggcccgagcagcagataccagggcaagtcgttgcgccatttttcgctgcgcccgcggtacaggctcgaactcttgagggtgcgcatggcgtcgcgatagcgctggcgcaggacgccttgctcttcgctgatcagaccgtcacgacgcaggcgttcctgcgcctcatcgtcgctggcctcggcctgcttgcggcgggtgctacgccagctggcgaacacaatgaacaacccccaggccaggcacagcccggcgatggtcaacaggcgactggtggacgactcccagaatttgtagtcgtttaccgccagcagtggtccaacgaaccacaccagcagggccaacaccaacaagacacacaggctccatacccaggtcttgcgaaaaaacgcggcaagcttgccgaaaaaaaccttcatggcattacgtccttgttacggcttgggctcgacctgaatggtcggatcgacgggttggtacggctgcagcacggtatcgcgctgctcgcccagtacccaggcgaaacctgcgtacagcatcccgaggcagatcagcgtgaacagcgcgaccatccaccagggcacgatgcgcaccaggcggcgacgcgtgtcgcgcagaccctgccaatgcggcgagacttcgcgcggaacgtccccgcgcaattggcggatctgccggtagagactgtcgcgcaccgcttcgagctcgagcatgccgcgcggcatcacccggtatttgccttcgaaacccagtgataagcacagatacatcagctccagcatcggcagatgcttgaccgggttgcgcgagagacgctcgagcagctggaagaacttctcaccgccgaaggtctcgttgtggaagctcgacagcaggctcatctgcgaccattcgctctcgttgccccaaggcgtggtgaccaccgcttcgtcgatcgcggtacacagcacatagcgggcggccatgacctggctgctttcggcgccatcgtgcagcgcgcggcgctcgaacagcttgagttcagcggacaagcgctggttgagcgcatgcaggtcttcgccttcgtagctgtgcttgagccgcaccacttccgagagcagcgaggaagcggccgcgaccagcgggttgaggctgatgttgaaggtttccgccgggcgcaggcgcgcggcgtagatcatccgctcctcgagctgctcgaattttgggggcgcgctgaagtcggtcagcgggctctctgcgggagcgtcgccgcgacggttgaggatgaccgtcttgtcgtcctgtccgtagtccatttctctgatcatgtcggtcagttccttatcgcccaaaacttcagctcaagcccggtgaattcgccggacacgtggaaggcgaagccgccggagcgctccagttgcgccagttcctcggagttgagctccaaggcgaaataggtcttgcctgaatggaacggaatctgccgcggcgcgacgggcagtggtttcaccttgatgcccggcaagtgcaggttgaccagttggcgaatacgctccaccggaccgaccttcaggtgagccggtaggcgcgtgcgcagctcttcggagtcgcattgggcgctggctgcgagtacgaacgaggcgctgccgagcagcttgtggtcgtgcagcggcgagacctggatgccgtactgacgctgttgcagtagcagctcgatggcgtgctgttcgagcaccatcgacagcacctggcggatcgcatccatcagtttgcggaacgacaacccctgatcgttgtgcaggtagcggccatccaggcgaggccgtttggtctcgctggagaacgtcgccagctcgcccagcaaccccagcagttctctatatatgtgctcggggtgtatccggtcgatgcccatgtaatggcgtagcacgggttcgtagcggttgatcagctgcagcatcatgaagtcgccgacttccgcgccgcccaccttgccggttgcgcgaatccgctcggcgaggatgtcgccgcgatggccgagcatgctgatcacttccttcaggcaggacagcagatagctcgatgcctggaagtcaatgaaggtcgggatgtattccgggtcgaggctgatgaccccgtccggggtggtgtcgaggatgtcgcacagcttgagctttacgtaagcctgatcgctctgttgctcacccagcagcaggcgaaagtctggtcggccggtgctgacctggctgctgctgctatcaccggcgttggagtcggcgacttcctcatcgaacgcggtgtagcgcgccagcacgtccttctgctccggccgacgactttcgatgtggttgccggtcaccagcggtagcgccaagtagacaggtgtattgccggtattgggcggcacgtccagggccaatggttcacgctcggcgccaatctcgaacaggctgccatccggaagcaggccactggcctggctgagcaccagcttgcccatgttgagaaactggcggtcgatctccagctcgaaaaagccccaggcgtaatggcccaacttctgggttcgcagcttgagctgtgcgtcgtaatagcggtcgctttgctggaagtgctgcgggcgcagcagcatgccctcctgccagatcaccttgttcatgctcatcgatcagttccccttcgtgagcggatcgacggtttgaatgccgcgctcgtcgagacgcagctcgatacggttctgcgccttgtgctcaaggggaatgacgaaacgccagctcgattcgggcaggtcacggtaggcggccagcacaccgacgtagcggctgccttcctggacgaagagcttgaggtcgcgctgctcgcccgggcgcagttcgagctcttcctgaatcaccaggtccggggacagggcttccttgggtcgctggtagagcgagaagaaatcagcattctcgaatgccaccggatgcttgagttccaacaggcgaatcacgatgggcgagggtcggtcgttgaggtcggggttgagccggtcgcttccttgtagcgacaggtccagcttggtcaggtcggaatttggcgatagcgccgagcagccgccgagcacagccagcgctgcgatcagcgcagcggggagaaagcgagacatggacatcatccttgaaggtcggtgttgagcgtggcgatcaggcgtacctgttcctcgtacgtctgggcgaaatcgcgggcgaactgccgttcgctccaatcgtcgtcacgttgcatggccagatgcaggcgcttataggcgcgccagcgggtccctgcggtggcaatcagcggtttgttgtcacgctcgaagcgcaatgccaactggtctggggagaattgctcgagcatgctcttgatggccgcgcggctggcggccaacatggccacctggtgtgcctgcaggtcgcgataggcgcgccccacggcctgttcggccggcagctgacccgctttgccgccgcgtaacagcagattcagcgcttcgccactgtcgatactgtgtttgagcgggttgtttccggcgctctgcacggtagtaagcgacaggcgcatctcgtttttcagctccccacgggtgcgcagcgcctgttgcaacccgccgacgctttgcttgagcaggccggcagccttgagcgccagcgcctggcgagcctcctcgtccaggtcgtccagattcacgcctagcgcctcaccgaagcgagtccagaaaccctgcggtaggcactctggctctggcggagtcttggctcgagcaactggcttgggcatcaccagctcaggaacctgcaggttctcttcgtcgatttgggcgtagtcgcgctgctggggatgcgcgcgaggcggggcgagcacggcggtgagatcgtcgacctcggcatagacccgctcctgctggtccattgcattcagcggatcgagatcgagaaaggcgtcgtcgggaatgatgcttccggccggctgcgggcggccgatatcgccttcgaaagaggccgggtcccgaatcaaccgcgcccggatttcgaagtcgcccaggcaatagacactgccgtgctcgatgcgctgcgcttggcccttgcccaggctggcgccagtatccttgagctggatgccattgctgctggtgtcggtgaggaaaaaagcgccgtcccggtagctcacttctgcgtggcggctggacaagacacgcttgcggtccgggattacccagtcgcagtcctcggcacggccaatgatgccgccggcctgcttgaaggtcttgctgctgatgaggccgggcgcaaattgctgcgcactgaccatatcgaaaaccaattccatggtttctttctcctggtgggtcagttgctgcgggcaggcgcctgcggatcgcccagcgggcgatattcgtcgtcattgaatttgtagttgcgggagcaaccgacgagggcgagggatacggcgaataaaacgagggcgcaatagcgggctagcacgcgatttcctccttgaaagcgtgtgggcagacggcccctcttgccgaaaacggcgaagcgagactcaggctgagtattgaagttcacctgcttgtctgcatgggtgaacggggtcacgaaacggggcggggccgtcactgaaacgagagctagggctataaatgtgctcgccggacctaggtcacggcatggccatgcaggaagcgtaaggagacgtcggactagatgggctagcgcgagacggaacagtcctgccggcagggccatgagtcgccaaggactgatacgccgcaggcacgcccgccagcgctgccctatgcacatacaagcattccggagcaggagcgcacggtggccaaaaagaaaccccgccagcaggcggggttcttcatcaggcaaggccaccgggagcggcctgctggcgcgacgtcagcttagggcagggtgaacagcaccttgaccgaatcgttgactgcggcgctatcgacatagccaatggcgtcagcttcggccgcaaccttggcgaccactgccgcgtcgtcggcgacgctggacatcggctgacctttgccggtgaacaccaggccggaccagtaggacttcagctgcgactcgttcttgttggtgacagcggagtagaagctatccttggccggcgtccagtccttgatgtcgacgcccttcatggacttgtccttgcccaggaagatgttggcgacatcggactgcgacggcgtcttggctgcgccgggattgacgatcacggcgacttcggcctgggccatggcagccatgccgagcagtgccgcgctgctgagaatgcgaagggatactttcatcaggacgctcctcaaaatacgaagtcgacgccgacggaaacgatgtcgccgtcgtagttgcgagccggggcgccaccagtaccggcgctgaggtcgtacacagcgttgtcgaatacttcctgagcgttgcgtgtgaacacgccgtcatagccattcttggtgtcgacgcgcttgtactcgcctttgaccacgacggtcggggcggcctggtagttcaggcccagggtccaggagctctggcgaccgccgttgtcgtccagctgcgcgtaagtgacgtgtggcaggaagtcgccgaagcggcggccgcccatcaggtagaacgaatcgatggactccatgccatcgttctcgatcatgcgcgaggtccactcgttgctgctgacccaggtgccgttgtcgtactggtagccgatcgaggtgaacttgcctttctctttatcgaggctcagcagactgcggggcatcatcatgccgccgccgacattcactgtgccgctgatatcggtcttgatatcggcctcgacatagccgatgcgcagcgtgccgaaatcattggtcgccaggctcacgctggcgccgaacaggttgccgtagtcgatatcgaactgctcgtcgtaggcgtagtagtcacggtccttcgcttgaccacccgccacctggaaggtcaccgagccgtaggacagcggcagggtgtagaccgcgtcgacgccctcgtagttggtcacctggacctggctgtagacctcgtcgggcaggcgcagccaagggtagctgtagccgacgtcaaggctttcggagtacatgtagaccgggctgcgcaggcgaccggcgcggagcatcagctggtcattggtctgccaggacaggtaggcccactccaggttggccttccactcatcctgctgcgccttggcggtggcctgaacggtcacgccgacggtgtcggtgatgccatagctcagctgcgcgccggacttggacagctgatcgccgcgccaggaatcgttggtctggccttgtaagccataactgcggccctcgtcctcgccacccaggtgggtcacgccgacagtgccgaagccgttgaagcggtgctcgccctgttccagggcgaaggcttgagtggtcgccaggcagacggctgccaggccgataacacgtactgcggtcatcaggttgctcctaaagcgatttaaacgcggaattgggccgtggccgcacgcaggtgatcgcccgtgctgaccagttgctcgcccaggcgggcggtggcttcggcgccatttgcggttgcttgtgcgtcctgctgcaacacttgggtttcttgttggatggaactcgacaagccgatctgctcctgggtgaactgggcgatgccggcgttgagttcgtcgatctggttgacggtaagggcaatggtttcgagcaactgagtcgcctcgaccgagcgttcgatgctcgagcgcgacttctcgccattgctggtcatcacgttgagcacggtattggcgctgctttgcaggcgctggatgatctgctggatctcggcggtcgacgcggcggtcttttgcgccaggttgcgcacctcgtcggcgaccacggcaaagccgcggccctgttctccggcacgggcggcctcgatggcggcgttgagtgccagcaggttggtctgctcggcaatgctgcgaatcacggttagcaccgagccgacttcctgggtctcttcctccaactgctccatcgcttgcacggcgctcatcacgctggtgccaagatcgctgataccgctggcgagactgccgatgtggtcgcgagcggtggcggcctggcgggcggccgagttggcttcgtcggaagcctgctgcgagcgctgtgcaacctcctggatgctgccggtcatggtgaggatgtcgcgagtgatcgagtcggtatggtgttgctgcgacttggcgttctcttccgagccctgggtcagcttgtacagttctttcgaaacctgtccgagcgggctggcggcctcgatgatctggcgaatggtgagctgcagtttgtcgagaaaaccattgaacagctcaatcatggcgccgatttcgtcgttcgattcgacattcacgcgccgggtcaggtcgccgtcgccgcgagcgatggcttgcagcgaggcgatgacgccgcgcacgttggccatcacgctgcggatcaccagccaggctccggcactgaccaccacgatcaacaccaggctcaggacgataccgaggcgggttgtccgctcgttggcctcgcgggcttcggccagggtctgttggaagtcctgataggcgccggtacggaagtcggccgcaagtttctgcgcctggctcaggtcgctggccatgcggtcgagattcggacgcagatcgtcgaaggacgcactgccgtcgatcagtttcgtcgaggcgctcagggcgttctctgcgtaggttttaaccgcactgcgccaactgtcgagcgtctgccgacgttgtggctggctgctcagcagcgctcctaatgcctgctgctcggtatcgatcttgcccagcacatcgcgggcctcgtcgagcatgctcggttccccggctgccaccgcgttgttcagcaagcccggaatgcgcgaaaactgaaagatcactgcatcggctttttccagcgtcgggtagctctgggtttccagcatcaccagtcgcgagtcggtcgccgacagctgcaacgaggtgtagccgacgtagaggatcaacccgagcagcgcgacggcaggcaccagcgacaacttcgcggtcagcgagaaattcttgaacatgcatctactccacggagggcggcggatactacgagatgagagccgatagccaaatgccatctatcggataaattgtgactggatttaccgaagcggtcacgttatcggttgtcgcacgcctaacttgagcgccgctgagcggaattcaagccaaaaaaaaccgccccgaagggcggctctggtgctgctgcggcgcggcttacaggccgttcttggccttgaactcgcggcgacgacgatgcaggaccggctcggtgtagccgttgggctgcttggtgccttcgagcaccagctccagtgcggcctggaacgcgacattgttgtcgaagtccggtgccagcgggcggtaggtcgggtcaccagcattctggcgatccaccaccggcgccatgcgcttgaggctctcgaccacctgctcctcggttaccacgccgtgacgcagccagttggccatgtgctggctggagatgcgcagggtagcgcggtcttccatcagcgcgacgtcgttgatgtccggtaccttcgagcaaccgacgccggcgtcgatccagcggaccacatagccgaggatgccctgggcgttgttgtccagctcgttgcgcttctcttcctcgctccagttggtatttggcgccaacgggatggtgaggatgtcatcgaccgaggccttctcgcgcttggccagctcggcctgacgggcgaacacgtcgaccttgtggtagtgcatcgcgtgcagggtcgcagcggtcggcgacggtacccaggcagtgttggcaccggccatggggtggccgatcttctgttcgatcatgctcgccatcaggtcgggcatggcccacatgcccttgccgatctgcgccttgccctgcaggccacaggcgaggccgacgtcgacgttgttgttctcgtaggcgccgatccacttctcagccttcatcgcggccttgcgaacgaccgggccggcttccatggaggtatggatctcgtcaccggtgcggtcgaggaagccggtgttgatgaacaccacgcgctcgcgcgcttccttgatgcaggccttgaggttgatggtggtgcggcgctcctcgtccatgatgccgaccttcagcgtgttgcgcggcagactgaggacgtcttcgacgcggccgaacagttcagtggcgaaggccacttcttccgggccatgcatcttcggcttgacgatgtacatcgagccggtacggctgttggcacgggtggtgttgcctttgaggttgtgcacggcgatcaggctggtgaacaggccgtccatgatgccctcgggcacttcgttgccgtccttgtcgaggatggcgtcgttggtcatcaggtggccgacgttgcggatgaacagcagcgaacggccgtgcagcgtcagctcgccattgccgtcggcctgggtgtagacgcggtccgggttcatggcgcgggtgatgcgcttgccgcccttgtccagttcctcgaccagatcgcccttcatcaggccgagccagttgcggtacacgacggtcttgtcgtcagcgtcgacggccgcgatggagtcttcgcagtccatgatggtggtcagcgccgactccatcagcacgtctttgacgccggctgcgtcggtctgaccgatggggctggtcggatcgatctggatctcgaaatgaatgccgttgtgcttgagcagcacggcgatcggcgcatcggcggcgccctggaagccgcgaagctgggcggagtcctgcaggccagtcgtgctgccatctttcagtgagacgaccagcttgccgccttcgatgcggtagccggtggagtcggcgtgggaaccggtttccagcggcgcggcttgatcgaggaaggcacgggcataggcgatgaccttgttgccgcgcacttcattgtagccagggcccttggtggcgccgtcttcttcggagatgacatcggtgccgtagagcgcgtcgtacagcgaaccccagcgggcattggcggcgttcagggcgaagcgcgcgttcatgatcggtacgaccagctgcgggccggccatgcgggcgatttcttcgtcgacgttctgtgtagtggcctggaaatcctcggcttccggcagcaggtaaccgatgccctgcaggaaggctttgtaggccaccggatcgtgagcctgaccggcgcgggcctggtgccatgcatcgatctgcgcctgcaggtcgtcacgcttggccagcagcgcgcggttcttcggcgccaggtcgtggatgacgctggaagcgccggcccagaaggcatcggcatcaatgccggtaccaggaatcgcttcgttgttcacgaagtcgtacaggactttggcgacctgcaggccaccgacttgaacgcgctcagtcattactcgcctcacttggttcttcttcaaatccgtcggacagtttcttcttgtagtccgggacggcggatactacatgaagccgtagggaaaatcagtccgccaaaggactgctccagaccccgcaagcaagcggatgcccgggccggcgggtttgaaatgatgggctctgcgcggctacggtggcagattgttctatacctatggagccggacgccacgagtgaggtccatagcaatcgtttccccgggcgacccgcacggatcgtccatccatcatgtgaggagccaaacatggatcatctcgtcctaaccgtcatcgccgaggaccagcccgggctggtcgagcgcgtcgccaagtgcatcgccgagcatggcggcaactggctggacagccgcatgtcgcgcatggctggccagttcgccgggattttgcgggtcgcggtccccaaggaggcgcatgccgggctgaccgatgcgctgcagcgactggagcagcagggcattcgcgtggtattcgcccgcagcggcgaggtgcccgagcgcagctggcgaatgatccagttgcagctggtcggcaatgaccgcgccgggatcgtgcgtgacatcacccggctgctggctgggcatggcatcaacgtcgaaagcctgaacaccgatgtcttgcccgcgccgatgaccaacgagttgctgttccatgccgacgcgcgcctggcggtgccggccgagctgtcgctcgacgatttgcaacagcaccttgaaaccctggccgacgagctgatggtggagctcaagctgcaaccggccgagtgagcccgctgcggtcaggccaccgaccccctgcgcatcaagcgccaggcgtcatagctgtacaccgccaggcccgcccagatgcagatgaacgcgagctggcggtcggcggggaaaggctcgttgaacacccataccgccaggatcagtaacaacgtcggtgtgatgtattgcaggaagcccagggtcgaatagggcaggtggcgcgcggcggcgttgaagcacagcagcggcaacagcgtcaccggcccggccgcgaccagccagagtgcctgcgggtcggtccagaacgaccattcggtgctcgggccgctaccgaagaaaaacagccagcccagggcgatcggcaacagtaaccaggtttccaccaccagacccggcagcgccgccaccggggcctgtttgcgcagcaggccgtagctgccgaagctcagcgccagaatgatcgagacccaggggaaatcaccaagcgtgatcagctgcagcgccaccccgacggccgccatcgccaccgccagccattgcaacggacgcagccgttcgcgcagcacgatcaacccgagcagcacgttgaccagcgggttgatgtagtagcccaggctcgcttcgagcatgtggttgtggttcaccgcccagacgtagatcagccagttgcacgcgatcagcacgctggaaatcatcagcacaccgatccgccggggatgcgcaagcagttcctgccaccagcccggatgacgccacaacatgagcaccagcgtgccgaacagcgccgaccagatggcgcgctgggtgacgatttccagcgccgcgtactgctcgatggacttgaagtagagcgggaacatgccccagatgcagaaggtcgtcagacccaacagataccctttacgcagatcggcagtggccatgaatgtcccggaacgcagcagcacagagccggccattttgcgccagtgcgatggggtttgtctgccgtcgtgactgccctgcgtggccattaagcgcctcgccaacaggcggcgttgaacgcctccggcggcagtccgtctgaagatgacaagccagggggcgccgcggccccctgcagccatgcgaggtatgcgatgaaattgcagaacaaggtcgcgctggtcaccggcagctcccagggcatcggccgtggcatcgccgtccgcctggccgaggagggcgccgatctggtgatcaatggccggcatgatgacgacgagtcccgggagactctcgaacaggttcgcgcactgggtcgccgtgcctgtttcattgccgccgatgtcggggtggtcgccgaatgccagcggttggttacccaggcgatcgagcaactggggcgtctcgatattctggtgaacaacgctggcgtgcagcggcacagtccgtttctcgacgccggcgaaggcgattacgacctggtgctcaacgtcaatctgcgcgggccgttctttcttgcccaggcgttcgcgcgtcacctgcgggacacgggacggggcgggcggatcatcaacaacagctcggtgcatgaagagctgccctttcccaacttcaccagctactgcgccagcaagggcgggctgaagatgctcatgcgcaacctggcggtcgagctggcgccgctgggcattacggtcaacaacgtcgcgccgggcgcgatcgagacgccgatcaaccgggccctgatgaaccagccggaaaagctgtccggcctgctgggcaacattcccgccggtcgtctcggccagccgcgtgacgtggccggtgccgtggcctttctcgcctcggacgaggccgactacatcaccggtactacactggtgatagatggcggactgctacggaattacagcgagcaatgaccgataccgatccgagccccttcgattacgacacccgtgcggtttccgcggccgataccctgaccccggcggatcgttatcaggaactgttcgtggcggtgcagacgcagcgcgtattcccggacagcaagaccttcgtcgactgcgccccgcggcagcatcccgagcgaattctcgaggcctaccgggcgcgcaaccaggagccgggtttcgacctgaaatgcttcgtgcaagagcatttcgaggtctaccagcgtaagccgaccgagttcgtcgccgatccggacaacagcctgagcgaacacatcgatcggctgtggccggtcctgacccgccagccgcgcaagcacccggagttctcctcgctgttgccgttgcctcacgactacgtggtgcctggtggccgtttcaccgagatgtactactgggattcctatttcacgatgctcggcctggatgagagcgggcactgcgaactgttgcggtccatggccgacaacttcgcctacctgatcgacacctacggccacgtgcccaacggcaaccgctcctactacctgagccgctcgcagccgccggtgttcgcgctgatgaccgatctgttcgaagagtcgggcgtgcacaaggcccacgactatcttccgcagctgcgcaaggagcatgccttctggaccgagggcggcgaccagttgcggcccggcgagacccaccgccgctgcgtctgcctggccgacggcagcgtcctcaaccgctactgggatgagcgcgacacgccgcgcgaggagtcctatctcgaggatgtcgagacggcccgctcttcaagccggcccgcccatgaggtctatcgcgatctgcgcgccggggccgagtcgggctgggacttcagttcacgctggctgggcgatccgcagcgcctgtcgagcattcgcaccaccaagatcgtcccgatcgacctgaattgctttctctaccacctcgagcgccagatctgccgcctcagcgaggcaaaaggctggcactcctgcgccgaagagtttggtcggcgggcacaggcgcgtgtcgccgcgatcgatcgttacctgtggaacgagcaacagggggcctacttcgactacgactggtcactcggccagccgcgcgacaacctcaccgcggctacgttgacgccgctgttcgtcaagctcgccagcgagcagcaggcggcccgggttgccgatgtcgtccgtgaccgattgctggcgccggggggattgtcgaccaccgagatgagcggtaccggcgagcagtgggatcgccccaacggctgggcgccgttgcagtggatcggcattcgcggcttgcaatattacggtcatgacgcgctggcgctgcagatcgaggagcgctggctgaagatcgtgtcgctgctctacgagcgggatagcaagttggtggaaaagtacgtgctgcgccccagtgccgagcatgccggtggtggcgaataccccttgcaggacggtttcggctggaccaatggcgtgacccgcaagctgatgcaggaagacccgacccacgaggcccaccgctgccgcgcggggcaatgccggccggaatgggctgattcgataggtgatcagggttgagcggcggattcggggctcaggttgagcttcgtggggccgcattcgccgcgagggcgcgactcccacagtaaagcggcgcggtgtggtttttagctttgtgggagggccggcctcggcgcgaagcttttgatcttgtgaccgtctggcactgcgtcagggcgtgcgtcgatagggacttgccagcgtatcgggcagctccagagtgcctttctcgacgaaacgctgggtaccgaacaggcctccggccagcttgccgcgcaacacgtaagggacttcgtcgagcccgatgtgctcggccagccccagcgcctggcgggcggcggaaaatgccgagacggtcaccggcacgctgagcacggtctcgccaaagcgcggcacgctgccacgcgcatcgctgactccactggccaggcgccgaccgttgacttccagatccagtgccacgccgttgtagtcgagcgccatgtcgttgggattctggatcctcagcttgacgttcatgcgcagttccagcccttcgccgggcaatggctggataccggcgacctgaacgttgagcgggtcgcgttggctgaacgccgcacagcccgacaggaccagcaacagcactgacaacagcgcgaagtacgatgggattcggcgcataggctactcggatttcctggtgagtttgtccagcccctgcaacagctccatgggcagcgggaagacgatggtggagttcttgtcgccggcgatgttgctcagcgtctgcatgtagcgcagttgcatggcgccgggttggcgaccgagcatctcggccgcttgcatcagtttctccgaggcttgcagttcgccctctgcatgaatgaccttggcgcgccgctcgcgttccgcctcagcctggcgggcgatggcgcggatcatcgactcatccagatccacgtgcttgatctcgacgttggccaccttgatgccccaggcatcggtctgcgcgtccagcacctgctggatgtcgttgttgagctgttcgcgctcggccagcatgtcgtccagatcgtgcttgccgagcacggcgcgcaaggtggtctgagccagctggctggtcgccgagtgatagtcctcgacctggatgatcgccttctcggcatccagaacgcggtaatagaccacggcgttgaccttgaccgagacgttgtcgcgcgagatcacgtcctgggtcggtacgtccagcaccagcgtgcgcaggtcgactcgcaccatctgctgcagaccgggtatcaccaggatcagccccgggcccttgaccttccagaagcggcccagctggaacaccacgccacgctcgtattcacgcagaatgcggaacgccgatgccagtagcgctatcagcagcaccagcacggcgatgaagctcatttcgaaacccatgattcacctcttctcggttggcggcgcgtcggccgcggtgacgtccaatagcagtccgcgtctggccatgatgcggacccgttgaccgggccgcaggggcgtcgggctcaccacctgccagtgttcgccctgcagctgcacccagccgtgggcggaatcgttcgccttgatgcgggtcaccgtcaccaggctgccgaccagctcggcatcgccgctgaccaggcgttgccggcgcgccttgagcgccatgctgacgatggcgaacaacagcagcgcgctgaccactgccagggtgccgatcaagctcaatggaatgccgtagcccggcacatcggtatcgaacaggatcaccgcgccggtgatgaaggcgacgattccgcccaggccgagtacgccgaagctgggaatgaacgcctcggcgatcatgaagccgagccccagcaggatcagcgccacgccggcatagctcaccggcagcagctgcagcgagtacagcgccagcaacaggcagatgccgccgaccacaccacccgcgccggtgccgggattggagaactcgaagatcagaccatagacgccgatcatcatcaggatcagcgccacgctggggttggtgatcaccgccagcaggcgcacccgccagtccggatcgtagcgatccagggtggcgtcggcggtgtgcagcgtccgttctcccgtacgggtctgcagggtcttgccgtcgagctgacgcagcaggtcagcgagatccaccgcgatgtaatcgaccacctggagttccagcgcctcgctggccgacaggctgaccgcctcgcgcacggcctgctcggcccactcggcgttgcgcccgcgcaattgcgccagtccgcgaatgtaggcggacgcatcgttgacctgcttgcggctcatggcgtcgccgccgccttcgcctgctggcgcttgcttgtccggtggatcctccggcggcgcggcgggcgtaccgccgatctgcacgggggtagcggcgccgaggctggtgcccgggctcatcgcggcgacgtggctggcgtagagcatgtaggtgccggcgctggcggcgcgtgccccgctgggcgtgacatgggtggcgatcggtacggggctggcgaggatttccttgatgatcgcgcgcatcgagctgtccagaccgccgggcgtatcgagctgcagcaccaccaattgggaatcggtctgtgcggcgtgccgaatgccgccgacgacataatcggcactggccggcccaacgatcccgtcgagccgcaggaccgtgaccggcgctgccgcctgggccgcacccgcgaggagcagccatcccatcagcagcagcgccgacagccaggttggcggacagtgaacgcggctgaacatgacgtgttcctcccgaggacaaaatggagcggcaatggccggtcatacccaagaggatagttcagcgggccaggtccctgttctgccgcgggcgctttctccggcgaagtccaaacgggctgaactctagggcgccgtcgggcctcagaacgttgacgaggtcgcatttggttcggcgacccgtggcccggcatgggagtgtcttatgcgtattcatcacctcaactgcggctgcatgtgtccggtgggaggacgtttgttcgatggcttcagtccgggactgaccgccagtctggtgtgccattgtttgctgatcgagaccgagcaacacggcctggtgctggtcgataccggctttggcagctgcgacgtgctggagccacgcaagcgcctgagcgccttcttcatcacgctcaacaacatcaagttcgagcgccgcttcaccgcagtggagcagatacgccagctgggtttcgccccgcaagacgtccggcatattcttctgacgcacctggatttcgatcacgctggcggcctggaggattttcccgaggcgcaggttcacgtgctgcagcgggaaatggacgcggcgcgctctacccacagcttcgtcggccaccaacgctatcgccatgcgcaatgggatggcgtgcgcaactggcagttctacgagccgggtggcgatacctggttcggctttcaggccgtcagggaattgcgcggtttgccgccggagattctgttgattccgctgacagggcatacgcacggccatgccggcgtcgcgctgcaacgcggcgacggttggctgctgcatgccggtgacgcctatttctatcgcgacgaagtgggccagaacgagcgccactgcacgccggggctgcgcctctatcagcgcatgatggaagtggatcgcccggcgcgcctggccaaccagcatcggctctggaccctgtcgctggagcacaagcacgaggtgacgctgttctgcagccacgatgccaaggagctcgagcgcatgcgcgcgggggcgcgctgatgccgccgcgtgacgagcgagtcggcggttccgtgcgcaccatgatgcggtacgcgcgctgggtcggtctggtggcctgttcgctggccgggctgggctacctgctcatcggtcagttcaacatggccggcctgatgctggcgctggcggcgctgtcctggatcaacattcgccgcaagcgtgacgatcgttcctcccggggttgatcaccaggccagacgccgtgcctgacgaggacggtcaaggaacccctgaaggccgatcgggtcgattcaccatacgcttacagcaggcagacccgaggaaacccgaatggacctgattcgaatcatcatcgcgatacttttgcccccgctgggcgtgttcctgcaagtcggttttgctggggccttctggctgaacatcttgctgacgctgttgggctatattccgggcatcattcacgcggtgtgggtcatcgcgcgacgctgacgcgcggcatcggatgcgtctagcccggccgttcggccgggttttttgtgctcgcaagcgaggcagtgtaaagtccgaggccgactttcacgtgcgtggggcgatctcgcgcgaatcacctagtacttgcagggatcagtgcgtttggcaccagcgccacgcagctgcccgagcgatcgtgcgtgtccgtcacaggacggcactcaggaaggaaccagatgggcgactctttcatcgatcagaatcacttccggcgcgtcctgaaccgcaacgtggcggttcctctgggcttcggtttcctcagcgcgtttttcttcagcgtcatcgtctatttcctgctgaacgtcagccactgggtggagcgctcggtgctgggcgtttcctatgcgcacgagatgctgaaagagataggcgaactggaggcctcgatgcgcggctatcttatcgccggcgacgaggtgttcctgcagccttatcgaaccaacctgccggcattcgccgagcaactgcgcaacctcgaaggatacgcgagcgatgatccggtacagcggggtcgcatcgcgcgcgtcgagcagttgcacgaccagtgggtggactttgccgagcaggcgatcgccctccgggcgaagaacgaacctgtggtcgactatgtgcgcagccgtcgcgggctggagctgaaggaagagcagcgccagttgctcaatcaattcatcgcctatgaacggcaggtcagaggcgagcgcaccgatacggcggaaatgatctccaccgtgctgataggcggcttcctgctgttcagcctgattttcagcgggttgctgggctttttcgggcgccgtgacctgctgagcctgtccgaaagctacgccgaatccctcgccagacagcaggctcatgctcaagcgctggaaaagcaggcctggtatcgcaccggccagacccagctcagcgagtcgatgatcggcgagcaggcgctgccgaccctggggcagaacgtgctcagctttctttcacgctacctcgacgtggcggtgggcgcgctgtacgtgacacaggacggcaaattgcagcgcgtagccgagttcggctgggacaaggaaacgctcaacagcggtcgtaccctcgagctgggcgaggggctggtggggcaggcggcgctggagcgtcgcatgatgctgctcgacagcgttccgcctggctatctgaaggtgcgatccgccctgggcagcgccgatgcccagtcggtactgattgcgccagtcgaagacagcggcatgctcaacgccgtgctggagataggatttctgcggccgttgcaggacgaggacagcgagctgctgcgtcgcgtcggcgacagcatcggctcggccatcgaggccgcacgttatcgccagcgcctgcagcgggccttggccgaaacccagcagctcaacgaagagctgcaagtgcaacaagaggagctgcgtgccgccaacgaggagttggaggagcaatccaacgccctgcgtgagtcccaggcgcacatggaagagcagcaggccgagctggagcagaccaacgagcagctcgccactcagaccctcgagctcgctcgtcagcgcgatgagacggacctgaagaacactcgcctgcacgaggtgcagttgctactcgaagagcgtgccgaggagctgcagcgagccagtcgttacaagtccgaatttttggccaacatgtcgcacgagttgcgcacgccgctgaacagttcgctgatcctggccaagctgctggccgacaaccctgagggcaacctgaacgacaaccaggtgcagttcgcccgttccatctattcggccggcaacgacctgcttcacctgatcaacgatatcctcgatatcgccaaggtcgaggccggcaagctcgatgtgcaccccgagccggtattgctggcgcggatgctcgatggcttgaaaagcctgtttctggcccaggccttggacaagtcgctgcagttcgaggttgagctgggcgacgggctgccggcgagcctgtacagcgatcgccagcggctcgaacagatcctcaagaacctgctgtccaacgcgttcaaattcaccgagcagggttcgatcatcctgcgggtaagccgccatgctgatcgccagctggcctttgccgtccatgattccggcatcggcattcccgaggagcagcaggcggtgattttcgaggcgttccgtcaggcagacggaaccaccaaccggcgttacggtggcaccggcctcggactatcgatctcccgcgagctggcccagttgctgggcggtaccatcgaagtcagcagcgaaccgggcgccggcagcgtgttcaccttgatcgttccggagacctacagcgaaccggttacgcccttgccgaccgagcccgagccgatcgtgatgccggaacccgccgcacctgctgcgcttcaggcagccaagccacggcagaccgacgaacccgcagtcccggtgctggccgatgatcgcagcgccgtttctaccggggaacgctcggtactggtcatcgaagacgatccccagttcgcctgcatcctgcgtgacctcgcacgggagctgaagtacagctgcctgatcgcgcaaaacgccgatgccggtttcgacaccgcggtccaataccgacccgatgcgatcctgctggacatgcgcctgcccgatcactccggtcttaccgtgctcgaacggctcaaggaaaaccccatcacccggcacataccggtgcacatcgtctcggtggaggatcgcaaagaggcggccctgcagatgggtgcgatcggctatgcgctcaagccggccagccgagacgatctcaagcaggtattcgatcggctggaggcgaagctggcgcagaaggtcaagcgcatcctgctggtcgaagacgacgcccgccagcgcgaaagcatgtcgcggttgatcgaggacgtcgatatcgaaatcacggccgtcgaatttggcgaacaggcgctagagctgctgcactcgaccgttttcgattgcatgatcatcgacctcaagctgcccgacatggacggccacgagctgctcgaacgcatggcccgggaggagatctgctcgttcccgccggtcatcgtgtacaccggacgcaacctgacccgcgacgaagaagcggcgctgctgaagtattcgcgctcgatcatcatcaagggcgcgcgctcgccggaacgcctgctggacgaggtcacgctgttcctgcacaaggtcgaatcggacatgccgttggagcggcagcagatgctcaaaagcgtgcgcagccgcgaaaaggccttcgaggggcgcaaggtgctggtggtcgacgacgacgtgcgcaacgtcttcgccctgaccagtgccctggagcagaagggcgcgctgatcgagatcgctcgcaacggccacgaggccatttcacagttgcagaacgtcgacgatatcgacctggtgctgatggacatcatgatgcccgagatggacggcttcacggccatgcaggagattcgcaaggacaagcgcttcgccaagctgccgatcattgcggtcaccgccaaggccatgaaggacgatcaggatcgttgtctgctcgccggggccaacgactatctggccaagcccatcgatctggatcgtctgttctcgctgattcgcgtgtggctaccgaaagtggagctgttgtgacatgccggaccgcaaccaggccatcgaactgaagctgctgatcgaagcgatctatctgcgctacagctacgatttccgcgactactccggcgcctcgctcaagcgccggatattgctggcgcttaagcaactgcaatgcgacagcatttccgagctgcaacgcaagatcctctatgagcctcaggtgttcatggagctgctgcaatacctcaccatcccggtgagcgagatgtttcgtgatccgagttattttctggcgctgcgcgagcaggtggttccggtgctgcgaacctatccctcgctgaaggtatggatcgccggctgcagcaccggagaagaggtctactcgatggccattctcctcaaggaggagggcttgctcgatcgcaccatcctctatgcgaccgacatcaatccgcgctcgctggagcaggcgcgccgaggcatcttcgatatcggcgacatgcgccagtacaccgaaaattatcagcgtgccggcggcaaacagagcctgagcaattactatacggcggcttatgactcggcgatcatggataagtcattgaaagataagataacttttgccgatcatagcctcgcgacggacagcgtcttcgccgaaacccaactgatttcgtgccgcaacgttctgatctatttcaacaagcccctgcaggaccgggcctttggcctgttccatgattctctctgccatcgtggttttcttgggttgggcagcaaggaaaccgtggagctctccggctacgctggacgctacgaagcgttcgacaagcaggagaggatcttccgcaagctatgaaaccccaggccgccggcattccagcccgttcccctcgaccgatagacgcggtggtgatcggcgcctctgcgggcggcctggctgcgttgagcatgctggtcgacgggctgccaggcactctgcgccaggcgctgctggtggttcagcatgtaccggcgggcaggccgacccagttggccgagatctttcagcgcaggacggcgctgcgggtcaaggaggccgatgacaaggagacggtgcgcgccggcaccctgtatttcgccgcgcccgggtaccacttgctggtggaaacggacctgagcctgtcgctcagccaggacgaggcgatacatttctcccgtccctcgatcgatgtgctcttcgagtcggccgccgacgcctggggcgagcgccttgccggggttttgctgaccggtgccaacgaggacggcgcggccggtctggaggcgatcaaacaggccggcggcatcagcatcgtccaggatccagaagaggccgaagtgccaaccatgccgcttgctgcactccagcgctttgcgccggattatattttgcccctgcgcgatatccatcgactgttgcgcgaactggagtgactcatgcctgaccaaacggacgaagcgaacctgctgatcgtcgatgatctgccggagaatctgctggcgctggacgccttgctcaaggcaccgggtgtgcgtgtgcatcgtgccgaatcggcagaacaggcgctcgaattgctgctgcgtcacgagttcgccctggccattctggatgtccagatgcccggcatggacggttttcaactggccgagctgatgcgcagcaccgagcgcaccaagcacattcccatcgtcttcgtcagcgccgctggacgagagctcaactatgccttcaaggggtacgagagcggcgctgtggatttcatgcaaaagccgctggatatccacgcggtgcgtagcaaggtcagcgtgttcgtcgatctgtatcgtaatcgcaagcgcctggcgcgccagctcgaggcgctcgagcgcagccgtcgcgagcaggaggtactactcgatgagctgcgcagtaccaaggccgaactggaggctgcggtgcgcatgcgcgacgacttcatgtccatcgtctcccacgagctgaaaacgcccctcaacacgctgatcctcgaggttcagctgcgcaagcttcagctggggcgcaacaacctcgcagcgttcagcgaggaccggttgcggcagatggtcgacaaggacgagcgacagatccagagcctgatccggctgatcgacgacatgctcgacgtgtcgaggattcgcaccggcaagctgtcgattcgcccgagtcgcgccgacctcggcaagctggcggccagcgtggtggagaacttcgcgccgcaaatggaagccagcggttgcacgctgctgttccagcggccggagccgatcatcggtgtatgggacgagtttcgtatcgaacaggtactggcgaacctgctgaccaatgccatgcgttacggcgcgggcaagccggtgcaggtcagcgtcagcgcgacgccagagggtgcgtgcatcgaagtgcgcgaccagggcatcggcatcagccagaaaagcctggagcgaatcttctgtcagttcgagcgcgccgagggcagcgagagcagcgccgggctcgggctcgggctgttcatcgccgagcagatcgtcaaggcgcacaacggccgcattcaggtggtgagcgaagagggcaaaggcgcgctgttccgggtgctgctgccgctgaacgccgaatcctgattcagcgccaggcgagcaccggccacccgcgcgcctcggcctgttcgcgcaacagcggatcggggttcaccacgtgcgcatgcgccacttgctcaagcaatggcaggtcgttgatcgagtccgagtagaaatgcgcgccgtccagcgattcgcccgctgcgtcggcccactcgcgtaaccgcgtcaccttgccttctcggtaggtcaacacgccacgggtattgccgctgtagaagccgtgctgctcctccagctggatcgccagcacttcgtcgataccgagccgttcggcgacggccgcgacgagaaactccgccgatgcggaaatcaccaggatgcggtcgccggctttgcgatgctcggcgaggcagcgcatggcgtcgctatagatcagcggctcgataacgtcctcgacgaagggctcgaccacgtgggcgacttcttcggccgtgcggcccactagcggcgcgaggctgaaggccatgtagtcctccatcgccagccggccgaaggcgtactcggccatcagctcggcatccttgcgcaggaaggattcgccatccacccagccaatcttggccatttcgtgggaccagaggctggcgcagtcgccgtcgatcagggtttcgtccaggtcgaaaattgccaatgccatcaagccacctcgtgaattgccgaagcgtcgatggtaaggcttacctggcggccgtggggatagagatcggccggggagcggttgagcacgtcaaccagcagctcgacatttcgcgcttcgacgcggtagcgaatcacattaccgagcaggctgtggctcttgataacccctgagatgccatcacccattacgccgctttcgctcagcacgatggcttccgggcggatcgccacctgggcgctgaccggacgttgcagcaggcgcgtggccaggtcaggggcgagcaggttgtagttgccgataaaaccggccgcgaatgcatccgctggcgcggtgtagagggtttcggcatcggcactctgcacgatccgtccggcattcatcagcaggatgcggtcggacagggtcagcgcttcctcctggtcatgggtgacgaaaatggtggtcagccccagctcctgctgaatcgcacggatctgctcgcgcaggtgcttgcggatgcgggcgtccagcgcggagagcggctcatcgagcagcagcaggcgcgggcgggtgaccagcgagcgcgccagtgccacgcgctggcactggccgccggacagctggctggggtagcggcgggcgaagtcgttcagctcgaccatctccagcacctcggccacgcgccgggcgctttcatcccacgcgaccttctgcatgcgcaggccgaaggcgacgttctgctccacggtcatgttggggaacagcgcataactctggaataccatgccgatctggcgtttctgcggggccagcggcaccaagtccgcgccgtccagcaggatctgcccgccatccacctcggtaagcccggcgatgcagcgcagcaaagtcgacttgccgcagccggacgggccgagcagggtgatcagctcgcccttggcgacttcgcaattgatatcgctgaagacccgggtgtcgccaaaggctttatgcaggttgcggatgctgagaaaactcatgccggcctcgttgaaaagtcgtcgggtaagagcgttgcatgggcaggtgtagcgcccctgcaggagcgaccttgctcgcgaaccatcacggcgaattcctttcccgattcaatcgcgtcgccgcccaggtaaacaccagcacgaagaagaagtaggaagtcaccagcgcgctattgaagtggccgctgctgtttttcatgttgttcaggtatacctgcagggtttcgtagcgcgtgcccaccagcagattggcaaagacgaattcgccgaacaggaaggagaaggacaggaacagcgacaccatcagccccttgcgcaagttcggcagcacgacgaggaacgccgccttccaggtgctggcgccgagcaggtgggcggcgtccatcaggtcgcgcaggttgatcgcctgcaggttgttgctgatcgcccggtacatgaacggcagcgcgatggtgaagtaggcgccaatcaggatccacggcgtacccaccatcgccagcggccccgagccgtacagctgcaggagcccgaccgaagacaccaccggcggcaccgcgaagggcagcaggatcagaatgttcatcaggccgtcgagcttcgggaagtggtaatgcaccacgaacagcagcggcagaatcagcaccacggccagcgccagggcaccgaagcagaccagcaaggactggccgaaggcacgcaggaagcgctcgtcgctccacagctgcaggtaccagtcgatggtcaggccgtccggcaggatggtcgccgaccagctgctggagatcgaatacagaaaggtcgctgccaacggcagcagcaggatcaggaatagcagccacaccacgacacggtggtagagcaggccgcgcctggcgtcagcggctcgcatggtagctcctcttcagcagcaactgatgcgccacggtgatcaccgccatcagccccaccagcaccatggccagggcgctggccatgttcgggtccagcgaaatatcgccggacaccatcgccgcgatgcggatcggcaagacgttgaagttgccggtggtgaggtaatagacggtggcataggcgcccagcgcgttggccagcaggatgacgaaggtgccgagcaacgcgggcgtcagcaccggcagcccgatatggcgccaatagctccaggttccggcgccgagcagagacgccgactcgcgccaatcctcgcgcagcgcgtcgaaggcggggtagagcagcagcacgcctagcggaatctgaaaataggtatagagcacgatcaggccggtcttggagtaaaggttgaagtcctcgatgatcccggcctgcttgagcaggatcgtcagcgccccgttgaaaccgagcaggatgacgaaggcgaacgccagcggcacgccggcgaagttgctggtcatgttggaaaaggccatgacgaagtcgcgcagcctggagtcgacctgacgcagcgagtagctgccgagaatcgcgatgacgatgccgaacaggctcgaccagaaggcaatctgcaggctgtgcttgatggcttgcaggtagaacttcgaggcgaagatcttctggaagttggccagcccccagccctcgggcgtgtgcaggctattgatcgtcacccagagcagcggggcgatctgaaaggcgaaaaagaacagggcgaagggcagcaggcagagcagcgccaggtgtttgccgcgtggtgcgcggcggctcgtggagactggcgtagcgctgtgttggatggcggcggtcttgaggctgttctcgagcggcgcggtcatctcagcagctcccgacacgccggtttgtcatgcggtacgccgagcagctcgcacagcgtgccgcacagctcggtctgtttcggccgcgcggccgcgtcgaggctgaacgccgagccgaggacgaacaacggtacttcgcgctcctccggcaacaggccgttgtgggagcgatcgttgttcatgccgtggtccgccgtgaccagcacctgataaccagcctccagccagcgcttcaggtactcggccagcaggatgtcggcgcggcgtgccgcgttgcggtactgagacgaatccaggccatgcttgtggccggcgtcgtcgatgttcatcgggtgtaccaacaggaagtccgggtcatgtcgcagacgcaggctttccgcgtcggcaaacaggtgcgaatccggatagtgatcctcgaaatagaagtgcccgtgctggatcggcagctcaggagtctcgctgtggcggtcgcgtgccgcgtgaaacggcgcgcggttatacagctcactgacccagtgataggccgcggcggccgtgctcagtccggcgtcgcgggcgtagtggaagatgctccgttcggtggaaagccgcaccacatcgttatgcacgatgccgctcacgatgggcggcacaccggtgaggatgcattcgtagagcgggcgggacaaggacggcagttcgcattccagccggtacaaggcgctacgcccggccatgcaatacgcctgcaaatgcccgagcgagtgttcggcgacctggtaattgaggccgtcgaggatgacgagtatggccttgcccatggtgcgttccttgttgggatggtcgtaggtgggctggggcggcgttccgcttcagcccaccgcgtttaggtggctaaagcgggacgccttgatcccaagcccaccggcgaccggtcactccatctcgatgatcacgttttcctgccattgctgcggcagcgccttggaggtcgcttcccaggcttcggcattcttgatgggtttgactttggcgtactgctcgttcggcagcagcttggcctgcacctcggccggcagcgtcaggtgctcggcgcgaatcggccgcgcgttgcccttggcgaggttgatctgcccggcgtcggagagaatgtattcgcgggccagcttggcggcgttggggtgcttggcccacttgttgatgatcgtcgtgtagccggaaatcaccgaaccatcggaagggatcagcacttcaaagcgactcgggtcgatctggtcgcggtaggaaagaccgttgaagtcccagaccacgccgacttccacttcaccgcgttccagcgtctggatcgtcgggttcgacagggacaggcggccctgcttggcgatctcggcaaagtagtccaggcccggctggatgttcgtctcgtcgccgccgttggcgatggccgcggccagcacgccgttcaccgcctgggcggcggcgctgacgtcaccgatggcgaccttgtatttgccatccttgagctcggcccaggaggtcggcgccttgtcgaccaactgcttgttgacgataaaggcgatcgagccggtgtaggccagcatccagtgaccgtccttgtccttcgcccagtccgggacctgttcccaggtgctcggcttgtaggcttgcgtcacgccctgctgcacggcgatcggcccgaaagcggcaccgacgtcgccgatgtcggccgtggcgttgtctttctcggcggcgaacttggcgatctcctgggccgaactcatgtcggtgtccatgtgcttgagaccgtatttcttccctaggtcctgccaggtgtccttccagttggcccagctgtccggcatgccgacgctgttgacctcaccttccgcgcgcgccgcctcttcgaggcctttcaggtccgtttgtgcagcgttcgccgatgtcgccagggcgatcgctgatcccagcagtgaagccagcagcagtcgtttcattcgaagctcctttcgcaggtcgttggtctagatcagcaagactggagccaatctagggggcgcaaatgacaatttgatgtcgttgcctccgccgccgcccgtaagagcgacaccgcgacaggagtgccgtagcaagcctagctcaggctgtaggccttgccctgccggcgttgcggcttttttatggtgtggtgaggtcgatcggttacgcccgtgcacgctttcggtattcacgtctgtcatgaacgcttcatttggccggcctaggctggccggcgaataaagagaggaaagggagcgcgacatgtgctgttctggtgctgggctagtccagcaggggagacgctgatgcgtgatgaggcaccgcgaacagtgaccgcgatctgccgcgcattgcaggagcagatcggccacggtctgctgccacccagcgggcaattgccgtcagagcgcaagctcagcgagctgttcgataccacccgtatcacgctgcgtgaagcgctcggtcagctcgagtcccttggtttgatctaccgcgaggaccgtcgcggctggttcgtatcgccaccccgggtgctgtacaacccgctggtgcgcagccatttccacgccatggtcggcgaacagggtcggtcacccgcgaccgaggtcctgtccgccagattgcaacccgcgacggcagacatctgcgcgcgcctggagctgccagcgctatcgagcgtgatccaaatccgccgcgcccgccgcatcgacgggcggctcgtgctctacgtcgagcattatctgaaccccagctactttccaggcatcctcgaccacgacctgacccgctcgctgaccgagctatatgccagcgaatatggcatccactatggccgggtccgtttcgacatggtccccaccgctttgcaccccgaagccgccacaaccctgcgcaccgcccccggcagccccgccctgcgcatcactcgcctcaaccgcgaccagcatgatcggttgatcgattgcgatgtggagtactggcggcacgatgcgattcatgtgtgtgttgaggtgccggagtagaggccggccgttagggcgggtttggcctgcactgccagttttgcttcgctcagcgatggctcgttccagctcgggtgagcgtttggtcctctgtgcattcggcagagcttggactattcggcaaacagagtggtgggaggagataatatttctgactaatcatttattcgggtatgagcaattggggaaacgaccgggtctttaaatagaacacggtgttgggcttgccgttggtggtttctaaaactgtaagacttctactttttcgcgtgtgtgaggagtgtttatattttttgaaattatggtttcaacaacggtttcaaactcctttttctggcagaagatgtatgtccaccatggtagcgttttgttggtgttttcgttgagccattcgtattcaaggcttattaggtggcgcgatctgtctatgtaaatgtgctttatctcattccaggtaaatacattgtgtctgtagagattatgcatttcttggaactgctttgaattcgccaatcctagataaagtaaccccatccccccagggccagcgagtactatccaaagtgccgatggatcaagcgcgatgacgaaaaagacggcgattgctgcgatgacagtcagccatttcaaggcgatcatccagcctttgccaggggctttccattcgcaggtctcgatacctgtttcggtcaggcgataagcgaatctagttttttgatgtgtggttccatgcaggactaaaaagaaaataggaatgaatattgtgctccaaaaaaatttttcaattaaaggagagctgtcatttttgaaaaacatgaaatagcaggcgcctagggcgatgaccatcatgaacacaaacatgccgttggcaaccgttgtgttataaggccgcgccttagtcttccactctagtagtgcatgttgattagagtctttccactggtggtggcttggaagttcgatggaatggttccatgttataagttgtaggaatctgttcaaggcactgctcataataaattattcatccgtatgtggcacctgcaaggggagcaagcgggtgctttgtgaagaaagcaccatatcggtattaggttccttgccgaatgcatcgcttttcaggtcagcctcggaggacgaggcactgatgtccacacggaacatatagccctggccgttagggctttccagaacctgcgccgggtagcgaacttccagctccagcacgggtgggcgctggtaggcgatccaggtttgccagagacgatgctgtgtgtccttggggtagaaggtgtcgccgggcagcggcccgttggggcgctgtgcgggcggctggccaaattgttcgatgggcgcccagtgaccttcgaggaactggtcatagaacttgtctgccatgccgtgcaccagcctatcggaaaaccagccgctgtcgaccatggccggttgcagtttcacagcttttcccgccagttcggacggtagcaggagctgtagccagaagccggtgtacatgcgggggccacgaccggagtatggcaaggtggaggcgcgggcagccaggctggggcgcaggcagatttccttaagggtgcgcagttcgtttttgtgatcctcgtcgctgtgcgtccagaagggggatttaccccaactgctgcgatacagccagagccgcataccctcacgcttgtactggttggcgaccatgctggagataaggtagaccatgccgagcagagcaatgatgatggtcaccgggttggacatgacccaggcaaagccgaaccagaagcccagggcactaccgactagttgaacacctgcgacgactgacataagacccagagtgatttgctttgcacgcagtgcataggcttctccagagctggtggccctatcgatatctttagaaacctgccaagcctctacccccgcagcgatagcgccgaaagcggccatgcccatagttcgtaagactagctgccggaccaacaatgaggctccaacttcgcccgttttaagccacgcttttacgcccgctcttgcaagttgagtcgtattccgaccaattgctttttcaagcttggcccatttgttccacgccggtaccgtccagagcgccatcaatgcgttggcggtataggcagcgttggccccgactgttcgtagctcatcctcactgaaaatgccgtcattgcgtgccttatccaggctgttgatgaagttccaaacattcagacctgcgaccagaacgggcaggctgccaccgagttcctgattgacccaaaggcggctgcgggccgcatagccagcggcattctttgccttgagctgtagctgttccagtagctccgattggcccagtgtggccagccatgcattcacttgacgggtctgtgtggttgtgatgcgtgtttctttggcaattgctcccacaacctcgttcggtctttgcagattgagtgtgtggcgtttttgctcaagatcttgtagctggatacgtgccgaacgcttgtccgtcccttttcctggaagtgcgaggctgcgttgcaggccctttatgttcttgttcagttgggcatattgcatcagccatttacgattcttcttagcaaatgcaggatcgcggatcagttgggtctgtgtggaaatttcggtagaaaccagcacctgggtcacgctgaaagcaaaaatgcgagcctcgggagcgaatttcgtacttaaggccggcagcaggacgaaggccatcaggttccagctgtctttggctttttgtgccactacggctcgcaaggtctcgaaggcgcgcttgcccggctctgaaaggctcttgtacagactgctgccttgtacgcttggcagatcgagtaccgatttcacctcgctggcccggctggcttcactggtgatgtccgagaggccgccgtgagcttggccgctgccgtcgccctgccgcccctggttgtcgatggtgccgtgggtggtgaagttgacggaaatcttgtcgatcagtgcggaaagctcggcgctgaaattaaataacgcaaggcccgccaacgtggtgggtttgccgtactgctcgcatagccatgtcttacccgtatcgctcgcgcccaattgctcatagaggttagccatggtttccagcagttcggttgattgctgctggtggcaggggtcataaaaaacttcctccgccttggggcttagatttttcaaccaggcgagcagatcgctttcgctgcgttgtatgtgcgcgttgaggcgctccatttcatcggagcgctcctgtaggtaagtccaggcctcttcgaagcgaacgtcctcgcgccaggtctttttctgttgccattcgtctaccagtacgcgccagtctttccccgagggtgaggttccccagtttgtacggaacagatgttgagcctgctgcactttcaatgacttgagtgtcagggtcgcgtcactgccaccgtgattgagtagctgtgcttcgctatcgagcaggctgtgagcgtctttgatgaaagcttgcttgcggcttgggttagtcgataccgattcgggcatgaaggggtctagtttgacgccgcaaagcccctggataagggtggcgctattgatcttgttggcatgctgcgtatcagctgctgccagctccagccagcgcccctgcagattcatggccaggtcatcaacgatggccatggggtcgtccagagcgacaaagagggcactgtcctggtcgggcacgctgcccaggatcagcgcttggtcgataggtttcttgcaggggcgggtggtgtcttctttgtgcgccgctacaaggcagctgttgaaggttggggcttctcctcgtgccaggatatcggcgacagcgctaccgagttcacggattggcgcggcgtgtgtcgcctgcatctggctacagtactgtggcaggttcagtgcgcgcatccatcgcttctgctcttgggggttgctgcgcattttttcgcacaggcgccaggtccactgaacaggcgcgtaggcaatgagcagatggctgcgctttgggtaaaggagatagggtttactttcaccgggattgtttcgttcatccttgcccagctgtgcaccaccccattgatggcggatgaattggtggcccttcacttgatattcgtgaagggtgcgatcagtttcattccaaacataaagccagccgtcacggagctgacgcagggtataactgcgcgtcttgagcttcggcaggtggctgctggaccagccttttggcagcgggtttggaccttgggcactgccgcgtgccggtgactcatctatcgcatagcgaacgggatggattgcaatttcacccgctttcagcgggcactggccgtttgcattggcgggcttgttctcgaaggcctgattgcgtttggcttgttgcagcgctttgtcagaagttgtcgtgctcatggaaatccgttcctttagccggcaaggcaatcttcatccagagcttgaatacgtcgctctggaggcagtttctgggcgtctggcaccttggctagccaagcttggtaggggctatcgaggcgtgtggtgaagtcgtcaccccagcagacgcagcgctccatccagatagcaatgctctgttcattgaccagcccccaggcttcggcatctagcaggcgctgttccaaccatagatctcgctcttgttcggcaaggcttgataaggtttgcggatagtcttcgttcaaccagtcgtaaaggcgttccttgaagcttcgccgataggcctgttctagggcctgaacctggtcatcggcgaggtggttgagtttgccctctaatgtcgggctgtgtggttgcggacgataggagtgccattcgactgctaccgagggcgcccaccttggaggggacagcggaacgagccattcaccgatggggcccaacagactttgataagcggacgagggatagctgttcaaccagtaagaggtcaccagtgggtcagcgaaacggaagaggctgtaactaccaaagccgtccgtgacggtgatgtactggctcaggtgatcggcgacatcgttcagcggtgccgaactctgtagtttgctggcctgacgctgaaaaagagggttgtgttgccattcattgagcaatgaggaatgcgtatctagccctactagaattgggccgatttctttgacgccgtcccagcgggtgccgttgtaaagtggaatgacctcgatatcctcgcctgctgcataaagccattgcagagcgtcctggcggagcacaccatctacgagcaagaagtctcggctcataccccggcctcctggttggctcgctcgcagatctcacagcgtggagaggctcgtagtaaagcttggcgctgcgcaggcactaggagctcgcctgccttatccgcatccgccgatttcaccgcgcccggctggaccggcgctgcccccgaccccttacccggactgccgccagaattcatccttatcagcggcccgaccatcgtgatgccgccggcatcgagcttgataaagctgcctgcggccttgaaggtcagttcgctgccggcttcgaggacgaccttgaggccgctggagaggtggatttcgttgccggcttcgacgaactggctggtgccgaacttgatgttctggttgttgccgacagtcaggtggtcgtctgctttgacttcgctgcggcggtcgccatgggtggtgcggtgttcttcggcgagaaactcgctgtagctgttggcttcgacggtgtcgtggcgttcgtggccgacgcggattttctggtcgtgctcgacgttttcatcccagtcgcgctgggcgtggacgtagatttgctcggcacccttgcggtcttcgatgcgaagttcgttgtaaccaccgccgccgggcgagctcagggtcttgaagacgctacgggtcttgttcgcgggcagttcgtagggaaccgcgttttctttgtggtagagacagccagtgatcagcggttggtcgggatcgccctcgaggaaggtgatcagtacctccatgccgacgcggggaatggcgatggcgccgtattgatcaccggcccaactcgatgaaacgcgtagccagcagctggttttgtcgtcggcctggccatggcgatcccagaagaattgcaccttcacacggccatattcatcgcagtggatctcttcgccgggcgggccggtaaccaccgcgctctggctgccaaggatgcgtggcttggggtgatcgagcgtggggcggaaggggacgctccatggggtggcggtgaagtggttgcgatagccttggatatagatgaccactttaaatacgggatcaaaatcatcaatttattcgcattgtcaaaattccaactcttttgattgatatacaagtcgtcttcttggttgtcattcaggtagtcgggcttattaggctctgtacgaaaagtcgtcgagcgaaggtcaggcaaggcgaaaacgctcgaagaagcgcagtttacgcactgtaaatgagcattctgagagcgatttcaacgcagcatcaccgagcgcaggcacttttcgtacaaagcctaggttttagctgcgcatccacatcctgccaaggctccaaattggcgtagcgcccccagcgcaattgcgtatgagtggggcttgtacgattggcatcctgcgaccacttatgtggcggctggacggggatgtcattactgcgataagccgaagcggcataggccgcttctggagctatgggggcattcatatttcagccccggtggatattgtcgtaatcgtcgcccttgggcgtggcctggatgcctttggcttcctggctgcggtagtagatttcgatgctcaggccggggtcgatcttgctctgtaggatgcagggttgcttctgccagttgtaatcgcggttgcgctttatcatctccgcacgaccacggcgttcccatgcccggtagggcatatcgcgccaacggcgcgggtcgcgtttgtgctgttggtcgtgcgcagcggtggtgggatcgaggtggcggaattgttcgaggatcggcagttccggcaggggctgggtcatgtccatatagcgttgcagggtatcccagaaggccagcgcttcttccaggttcatccccaaggattggattttagcgccgagaaacacttcgaccgaggtgtagcgatggtgcagccaaatggcgaaaccgctattgccatgagggccggggcgaaattccaaggtggcatcgaactcgtagaagggtgcgctaaaaggcttttggaaacgccggccgatggtgagcatgccggtctgacgattaaaaccactgccatcgtgggggaatacgcgtagatagatattttgtaagtaatcccagccgatcaggcccataaagacactacaggccataccggcgcagagccagaacaaatctgtgccatgagagtcggtttgataagtcgctaacgaagagaacagagctacgataaagcccatacctatttgaataaaatagtacttatagcgcggtttatctgtccacataaaccaactactaaagccgatcatgataaaggcaaaaataacaatagagaactcagctagtatctctaagtattccccgttaagtggcggagaaggtatggtaagcatccaaagaaaccatggaataaataaaagtgaccaccacttaaaatatgggataaaaatcatccatttgctggtgttatcaaaattccaacgcttttggttgatatatatatcgttttcttttttgccatccatgctattgcgcgctgccggctgtagctgtgcatccacatcctgccaaggctccagattggcgtaatgcccccaacgcatttgggtgcgggttgggccggtgcggttggcgtcttgcgaccatttatgcggcggctgggcggggatggcattgctgcgataagccgaagcggcataggccgcttctggagctatgggggcattcatatttcagccccggtggatattgtcgtaatcgtcgcccttgggtgtggccaggatgcctttggcttcctgctggcggtagtaggtttcgatgcttaggctggggtcgatcgtgctctgcaggatgcagggctgttcctgccagttgtaatcgcggttgcgctttatcatctccgcacgaccacgacgctcccaggcccggtaggacatatcgcgccagcggcgcgggtcgcgcttgtgctgttggtcgtgcgcggcggtggtgagatcgaggtggcggaactgttcgaggattggcagttccggcaggggctgggtcacgtccatatagcgttgcagggtatcccagaaggctagcgcttcttccaggttcatccccaaggattggattttagcgccgagaaacacctcgaccgaggtgtagcgatggtgcagccaaatggcgaaaccgctattgccgtggggaccggggcggaattccagggtggcgtcgaactcatagaagggcgcgctaaaaggcttttgaaagcgccggccgatggtgagcatgccggtctgtcggttaaagccgctgccgtcgtgggcaaatatgcgcagataaaggtcttgcaagtaatcccagccgatcagacccataaagacactaaaggccatgaaaaagcataaccagagactcgttgtatcttgtaagcgtggaaagttgagcagcgatatagctagggccacgacaaatgctacggaggtttgcaccaaatagtgcttatagcgcggcttgtcccgcccccaaatataccaatggcttaaaccaatcattatgactgcaaggaaagctagcaagctgagcaaaattacggggacggtagtgccgttctgcgcagtcatgtttttaatttgtggtgagaacgcctcacctattgcgcccccccatatggcccatggggcatataaaattgatgtccattttaagtacggaaataagatcatccatttgctggtgttgtcgaagttccagcgcttttgattgatataaagatcatcttctctttttccgtctagatagtcacgcatgccgggctgcaactgagcatctacatcctgccaaggttctaagtcggcatagtccccccaacgcaattgggtgcgggtcagtccagtccggttcgcatcctgcgaccacttatgcggcggctggacggggatgtcattactgcgataagccgaagcggcataggccgcttctggggggatgggggcattcatattttggcaaagtccctttgggcgatcagccagtaggctacgtcatcggcattgtcgtggtctgtgggtgtttgcgccgccaacggttgccagtcgcgcggcttgggctggggcagggtaatgcggttgtaaccggggaagggatcatccgcatagcacatggtttcgcccaggtggaactgcccgtagaccttgaggctgtattcgatggcttggcggtagcgccgtgggtcgccctccgcgagcatggcaaactgcgccggcaatacaaagagcaggcgattaccgtcaagcactaccgctccgagcttttccttggggatgggctgataacggtaagaccagccagaagcatggctacgggtgcgcagcacttccttggcgatcagcttgaagtcgacgccattgcggaactggcccagcagcggcgtgcgcagttccaccacccagtcttgcggcgccaggtaaacgcgcgcctggttttgcgcggccagcaggcgggcgttgtccgccgcgccggccttttcctgccagtattgcaggcgttcgatatggaagctcggctcgcccagggcgccgagcaattgctggtaggcctgcaaggggtcattcatctgtggcagacgctgtttagtgccgaaggggccgtgcttaatcgcctgctccaccgcgccatcgaccagtaaaaccgtgccaataacaccggctatcagtagcccgacgcccaggcccagcagccaggggctggccagcaggccgatggtatagagcgcccagatccccgagccgctggcggcgatcatattggccatggcgacatcgtcgtcgccgtcgcgcaccgcacggtaaccatcccaggcaaataacactgcggttacgcccatggccacagccgagccgacacgtgagacatttagccaggtgctgccggtacgtttcattaggttgtcggcccagaaaccggaggtctggaaacggcctcgctcccagaatacatgccagggattagccgtccgcttggcatcggttagcaacttaagggcaacgttattggcggcgagtcctaaatctaccgaggcaccaatagcacccaggacaaatcgccctatctcatcctgacgaataagattccccgcccccaccgtattcgcaaataagctatatcccgcacacacagtcgccagtatgggtatcgacttactattggcaagcgccttggccgtcttcagatgggccgcagcagtgcgccattgcttgtagtcggcgaccagcggatcgttggcctcggccgccaccaccatcacctgccccaagtccttctgggcaaagcccaggcgctcggccagcttgccgctactggtggcgagcacctggccgttgtttttttccaggctggcatacaggtagttgtcgcgggtcagggtgatgcgttcggcggcggtgataccaaagctgaagccatcgccatgcacgcccagcaccaccatattcttggccagggcttcgccttgcggcagcagtttcagccctttggcctggctatgcagttttttcagtacatcgaaggtaggcgcgaagctgcgctgcagttgcacctgggtaacgctgctgctcgcgctgatgcgcttgaccgccagcgcactggccgtggcgacgtggttaagcagctcgtccagcgccgacatcaggttctggccgatataggcattgttgagaaaactcagtgcactcaggcccaggcgctccggcttgacggcaatagtgctggttgcaagggcctgtagacgtttggccgtttccggcagctcaccctgggcgccggccagcaagcccttggtcaacgcatgggtggcctcgatcagttggcggctgagtttgtccacggcggcgctgactttcatatcctcggcttcgatgcagcgcgggtcgcagcccttgggcgagcggttgagcacttccagcagttcggccagttgggcatagggctccaacagacgttcgtcatggctatggtagaagtcgttccacaccgcaggcagccgttcgactagtttgagcatccgttcctgatggcgatagagctgttcgcgggcttgctcgcgctcggtatgcaaggtggcttttttcagcgcggcaatatcgatgtgctctttaaactcttgcagcggaccgtttacaggcatggcctcgctgtaaagcacttcggcataacggccaaagggctggtgtgggaccaaggcgttgagggtctgcaacagctcagcacataaccgcgactgagcgaccgcatggcgcagggcaaaaatgggatcatcaagcatcacgccaaccagttgcggatgaccgcgcaattggtattccgtcagcaagtctttgctggccggtaatacgggtaatggggcgggtggcgtggttctaataaaacctgccagctctttctgtagctgttcgagctgcttaaccaatgaggtagcaggtaactccgtgagaccagcattgaatagcagagggtcttcaagcagggtttcaagatgcaactcacgagcacacatacctttgctaatacgtgtgatctgaataattggcattgcttgagtcgctttccattgctcggggtcgaccacagcggcagcccaagcaggtgcgatgttttggcagcgttgcttgatgcgccccgaactggcttctagccactcgatgtattcccatgtccagggcaactcgctgtaggccatggcaagctggtcaccgacaaaacgcccttgcaacaacattggcacaagaatcagatgttgcttagcaccaataggcttgcgctcatccgccttgccgccgttctgtgcggttttgcgccagtgcgcgacatccacctcgaaaagctggccctggccgtcgctttccaactcgcgccagagcttgccttggcggaatacataaagccggccgggacgcagcagccctcctttaggggcctcgtcgaatttatcgtaacctggcaaccgagccatgggcacgacggcgaggaaggtgttctgctggatctccggctcttcctcatggctgcgcatatccgactcgatgggaatctgtagcatcccaccatcgctacgctcgatgttcagtgccagccgcgcacggcgcgcgttgtcgtattcggcgcgtttgcgggtgccctgcttgatgggctggtcctttagctcgctcatgcgtcaccttccgggtcgagcagttgtacgtgacgacccaaggcggggtcgccccatacatcgacaatcagctgttgtggccctaggtcacccaggctcgccagtggcagctgcgggttgatattggcctttccggtcttttcgccgatcggagcggtatctgccggtttgggtagtaccggtgataccggcgctgctcccgaccccttacccggactgccgccagaattcatccttatcagcggcccgaccatcgtgatgcctccggcatcgagcttgataaagctgcccgcggccttgaaggtcagttcgctgccggcttcgaggacgaccttgaggccgctggagaggtggatttcgttgccggcttcgatgaactggctggtgccgatcttgatgtgctggttgttgccgatagtcaggtggtcgtctgctttgatttcgctgcgacggtcgccatgggtagtgcggtgttcttcggcgcggaactcgctgtagctgttggcttcgatggtgtcgtggcgctcgtggccgacgcggatcttctggtcgtgctcgatgttttggtcccagtcgcgctgggcgtggacgtagatttgctcggcacccttgcggtcttcgatgcgaacttcgttgtaaccagcgccgccgggcgagctcagggtcttgaagacgctacgggtcttgttcgcgggcagttcgtagggaaccgcgttttccctgtggtagagacagccagtgatcagtggttggtcgggatcgccctcgaggaaggtaatcagtacttccatgccgacgcgggggatggcgataccgccgtattgatccccggcccaactcgatgaaacgcgcagccagcagctggttttgttgtcggcctggccatggcggtcccagaagaattgcaccttcacacggccatattcatcgcagtggatctcttcgccgggcgggccggtaaccaccgcgctctggctgccaaggatgcgtggcttggggtgatcgagcgtggggcggaaggggacgctccatggggtgacggtgaagtggttgcgatagccttggatgaagccggtgtcgtcgaccgggtcttgcgctccgtagggtgcggagtcggtgaccgactcttccagcacctgcggttgcttgccttcatggcgaatctcggtgagcagccatagctgattccagtcgccgcgcgggtgttcgctgagcgagaggaaatggccactgaccaacagcggctgatcgctagcgccttcggctagctcgaaatcgtggcggtgtcgttccagggcgcgacgggacaggtgcttgccgcgctcgcggtcgacgaaacggccggggtagtcgtagtcctcgaggtcgggttgaatgctgctatgaaccgccgcttccatcgtcaggcggggtttctcgaagtcatagtcgcggcgggtaacgcggctggtgcgggtttcgacgcgcacgccgaagcgcttgatgaccggctcatcggcgaccaggccgctgtcctgctggtaggcgaccggggccagcgtcgggaacaccgtctggtcatcgccaaacaccagcatatggccggtttcgctgtgtcggaaatggtagtgaatgccttcttcctcgcacaggcgctggatgaagtgcaggtcggtttcgtcgtattgaacgcagtaatcccgctcgggatagatcaccgggcctaggtcgaaacgatggctgtcgccggcgagaatgccgtgctcttcgagtacccgggcgatgatctgcggcaccgagaggtgctggaagatacgctggttggtccggtgcgtcagataggcaagcctggggacgaggaccaatcggtagcgcgtcagccgcttgccggattcgccttgagcggcgtgatggatctggccatgaatgccggcaccactcccggcgaatgccaggaaagcggactgctgaagcaggctctccagatcgatatctggatgctcgctgaccagctccagttcgaagcggtagggctggctgatggcttcgtggccgctgaactcaagtacttgaaggtcgtgctcgatgccttcgatgtgcagggaaaagtgcgtctggttggcgggggcgaacatccttgttcctcctggatccgtccatgatgtgcgccagggcgcatgcgggggcctgatgtaccacgcatcgacggcgttgcggtgcgctgggtcgcgcattgctgcgccgcggtttcaaattctcttactgcttcgcaaaaaaagcttcagccgggacgtgcccggccgaagtcctggatgcgctatcgccttagctggcgatcggggtgcgccagtcgtcggagccggacgtgccggagacttcgtgggtccagacgatcttgcggtaggtgaagtacacgtcttccagatgggtgaaatgggacatgttcgggtcctggcagttgggcatgcgcgactgcacgtcgacgatcaccgcatcttccagctcgatggtgaagtagtgttcctgggtgccggtggacgaggtgcggtaccactccaggcggcacttgttcaggcgctcgccggaggtcagggcgttgaagatcagcggcgacgatttgtcgaacaccttggtgatcatcagcggcttgtgcacgcgctggccggtgggctggcccgactgcgggtcgcgcgggatgatgacctgatgctggaaggcctgcaccagaatctggtcttcgtgtccttcctggaagatattgccaaccgagtcctcggtgaaagtgcctgcagtgatcaggccttgcttggtgccttcgagggacagatacgcgggtgttggcatgaacgctctccttgccttgttgaatgccggaatggcatcgaaacagctacaagcggcgtgccagatcagataaaagctttgtattcaataagttacaacttgcaggggcgacgcagcaaaccgctctgggccgttgctcacatttatctgggcaacatcctgccggcacctgcgcaagatctggcgcacccctgtgcgggccccgatatcggccgtgtcgcggcgataggggcgggtcatcgagctgcgccctgcgcagcatgttgcgcaggcccgaggctcaggacgaacagctgatctccaggtgcttgccccattccggtggtcgctcggcgtagcgctccatgcctggctgttcgtcgtagggacggctaaggacctgatgcagttcacgcaccgggccgtagtcgccggcttccgccgcctcgatggctttctgcgccaggtagttgcgcaggatgtacttcgggttggtggcgtgcatgcgggtccggcgcgcctcgtggtcgatgccttcccgttcgctacgttggcggtaggtcgccgcccagtcatcgaaggctttgatatcgaggaaatcctcgcgcagccgagccagcgcctggtccgccgggcggtcaccgagctcgcggaagaagcgcgtgtagtcgatggcgctgctctgcatcagttgcagcaggcgttggatcagttccttgtcgctctcctcggcggtttgcaggcccagccgcttgcgcatcaggtcgagccaggccgcttcgtagatcggcaggaacagatccatggtcgcgcgtagttggtcgatggcgatgaacggcgtcaaggcctgcgccagcgcggcgagattccagtgagcgatcggcacctgattctcgtaggaatagcggccggcatggtcggagtggttgcagatgaagcgcgcatcgaagtcgtcgagaaatgcgtaggggccgaagtcgaaggtgatgcccaggatggacatgttgtcggtgttcatcacgccgtggcagaagccgtacgcctgccaccgagcgaccatctcggcggtgcgctccagcacttcacggaagaaggcctggtaaggctcgggatgctccaggcattcggaaaagtggttctcgaccacgtgatcgagcagctttttcagttcgtcgtgccgcttggtgtaatagaagaattcgaaatggccgaagcgcacatggctctgggccaggcgcatcagcatcgcgccgcgctcctgacgctcgcggtagaccggcgtatccgagccggttacgcagagcgcgcgcgaggtgggaatacccagggcatggaggtgctcgctggcgagaaattcgcgaatcgacgaacgcagcacggcgcggccatcacccatgcgcgagtagggcgtcagcccggcgcccttgaggtgcaggtcccagtgctcgcctgcctcgttgatcacctggccaagcaacagcccacgaccgtcgcccagttgcgggttgtagctgccgaactggtgccccgagtagaccatggcgcggggctctgctgtgctccagagcttgtggccggaaaacagctcggtgaacagcgggtctccgacctctgccgggtcgaggtcgagcaacgccatcgcggcctcgctggccaccaccaggcgcggctgctccagcggctggggcgttatctcggtggaaaacacatcgcctagccgggcgaagcggttgtcgaaatgcagctcggtcagcgtcttcacggcagctccggaatagggcattacagcgtccgattacgggcgcactcgaatttggaggccaggctggcggtgacgttcctcagccctgactaccggccggcggcgcggcaggtttgtcctgctgatcgttccgcttgggcacggtcccgatctgcaactgcttgccgtcgaagttcttcaggaatatgtccacctggcggaaggcgatgttgatcccggccttggcgaattcgcgatcgatgaaccggttgatctcgtcgttcgccgggttgcgatcgcccagatcccgcacgtggatgcgcagctcgtggtccagcgtgctttcgccgaaattgaggaagaacacctgcggctccggatccttgagcacccgcgggttgtcctgcgccgccttgtagagcagcttcttcaccagatccaggtccgagccataggccaccccgaccttgatcgtcacgcgggtgacggtgtcgctcagcgaccagttcaccaactggccggtgatgaaggtcttgttcgggacgatgatgtccttgcggtcgaaatcggtgatggtggtggcgcggatgcggatacggctgaccgtccccgacaggttgccgatggtcactacgtcgccgatgcgcaccgggcgctcgaacaggatgatcaggccggaaatgaagttggcgaagatttcctgcatgccgaaacccaggcctaccgagagcgcggcgaccagccactgcagcttgtcccagctcacgcccagcgtcgacagggtcgagacgataccgatgccggccagcagataggacagcaaggtcgtggtggcataggcgctgccctgggccagatgcatcttggacagcaccagtacttccagcagaccgggcaggttgcgggccacggcgaacgtgatggcgacgatcaagagcgcgcccagcaggttgttgagagtgatcgcattggtggtggccgtatcgcccgtgctgctgacgaactcgtagagcaccacgttatccaggtaggagacgacgctgatcaggtcggcccacacccagtagagcaccacgaagaacaggccgaacatggccagacgggtcagccgcagcgactgctgattgacctgctcgatgtccagcgtcgcggcgccggtggtctcgctggtgtcgctgccttcgtcggcctgtgcttcgcgcttggccagtgcgcgctggtaggcgagccggcgcgcggcaacggtaaggccgcggatcagagtggcttcgatgacgatccaggccagcaacagatagagcgtatcgatcagcctgccggtcagcttcagtgcggtgtagtaatagccgaagcccaccaccacgatcagcgccagcggcagcacactgaacagcaggccgatgaaccggcgaaacgggggagcattctggctcgacggacctttgcgcagcaggcgggtcaggcgccagctcatcaacgcgaagcagaccagcacgacgacgattccgatcacatcgtcgacgaggctgcccggctggtgctcagcgatcgccaccacggcaaccagtgccatgaccaccagcccgagtcggcggatttcgttgcgcaggaacgccacctgtgggcgataccagccgaagtgcgtttcggcgacccggttcggcgcgagcattcgataggcgctgtagaacaccatccaggcctgggccatctgatagaaggcggcgccgaggctggtgttctggccgcgcccatccatctgcaacaggtagccgcagagtgcgagaaacaatgcgcccggcagcgccaacagcagattcagcaacaatgccagcggcgtgtgcagctggctgtcatggcgaaagtggccgatatcgccactcagggcatcgagcttggcgttgatcgcctgccggcgccagagcagcaggccgatcatcaacagcaacggtacgaagaacagtggtcgttccagcaggcctgcgcccagtgcgtcgaacaccgacgcccatggcatcgcccttaactgccggtcgagcagcgtcggaacacttttgagccagtccaggtcgagcggcttgttgctgggaatccagaacatttgctcgtccagcgtctcgcgcatggcctgcgccttggtttgcagctggcgctggttcaattgcagcgtgatcgattcgctgagcagggcgttgagctcgtgattgagccggtctagcagctcaccacgggtgcgtaccagctccagcagcgcgctgcgcaattccggcgtcacctcgctcggtggctggctcgccagctgctgctcgacgtagtcctccgggttgccggctgtctcgcggcgctggttcagttcgaactggtaaaggcgaatgtcggcgatttcatcggccagatccttgtccagtttcagcttcggcagggcctgctgctgctggtagaggaccttcgacagcaacaggctgccctcgagcacggcaatctgctcctcgagcgcctggtcggcctggttcagcgtatcgagctgctggcgggtctgcagattctgctgggtcaggtcgttgaggcgctcggtggcgcgcagcaggtagcccgaaagccgccggttctccgcgctctcggcgggcagcagtttgtccgagccggctttttccgctttgagcgagtatttggcgacggtctgctcggactcttcgcggcgcttgttgttgatggctgtctgtagcgcgatggtctcctgttcggcgcgcgcgatccgctcggacagcaagtcacggcgggcgacgccgaggtcctgcagctggctgttgcccgccagctcggcgcggcgtagctcgatctgcgcgttcagcgcggccttctcggcgctgagcagcgctcggcgttcgtcattaagcggttttccgccctcacgcccgctcttgagcaggttgttgatttcatcgatgcgcgtctggaatttgctgatatcggcctgtgcgcgttcggggcgggtctgcgcgctgatgatcatgctgttggcggcggtcagcgcggtttgccagcgcgacagttcgtcgacacgttcggccaggcgctgctccagttcggcgaccggcagtttggccagcttcgccgccagatcaccgagttcgctgcccttgagtttgttcaactcgtcctgtgacttggtgatctccttcggggcgccagccagttcggtcttgagatcggccaggcgctgttgcgccgtttcggcctgttccgccagccgctgcgcgcgctcgtcgagactgggttgcgagtctttcggtgtctcggcttcagccgccgaaggtccgcccaggccaggcacggaaggtgcggcttgaatgccagataaagatgggacgatggccagcagtgtcgccagcatcagggagcgcaggagggccatgggtagcatcgaagataaaaatgagagcagagtctaagggctgacgatgggcgaggcgagcccacagatcggaacgcgctgccgccctccacgtagcctggcggcgcttcttaaaagtgcaggctggggccgggcttgttgccttcggggaacttcaggccgaccttgcggacctcgccatgctccatctcggcaatcgtccagatcagaccgttccattcgacctggtcgccggtcactggcttgccgccgacacgctcggccatgaactgcccgatctgttggttgccgtccacatcgccgagtttcaggccgtacagcgcggcgagcgcgctcatttcggcttcggcttcgaggatgaaatcgccgaagaaacgcatgtcgcgcccacgctgtggtgcctcgctgaacagtttgccgagcgccggcagatcttcctcatggccgatcacgcagagaatgtcatcgacctgcagccgcgtactaccggagggatgcagcaacgccttgccgcgaaacagcgcggcgatgcgcgtgccggccggcatcttcagttcgcgcagggcggcgccgacgcaccatttcttggctgtcagccgatagatgaacatttcccactggctggtcgtgtggatctgcaagccggcgcgggagatcggcaacggtgaaggtggcacctcgaccttggccttcttcgctgcccaggtcagcgtcgtgccttgcagcaacagcgaaaccagtacgatgaagaacgccacgttgaagaacagctgggcgttctccaggccggccatcaacgggaataccgcgaggatcaccggtaccgcgccgcgcagcccgatccaggagatgaacagccgctcgcgcagatgaaagctgcgaaacggcagcaggccgacgaagaccgccagcggacgggcgaagagaatcatccatagcgacagggccagcgccggcaaggcgatgggcagcaggttgctgggggtgagcagcaggccgagcacgagaaacatgccgatctggctgagccaggccaggccatcgaacatgtgcaggataccgtggcggttgcggatcggccggttgcccagcagcaggccgcagacatagacggcgaggatgccgctgccgccgatggcaccggacaacgcgtagatcatgatgccgccggccaccgccagcagtggatagaggccgtccgcgaccgaaaggcgatttatcagttgcagcaacaaccagcccccggcaaggcccagcagggtgccgatgccgaactgttgcaacagattggcgaaaaagccccagccgaagccggtctggccggaggcgagcatgtcgatcagtgcgacggtgagaaacatggccatcgggtcgttgctgcccgactcgatctccagcgtcgagccgacccgctcgttcaatccgcggccgttgagcaggttgaataccacggccgcatccgtcgagccgacgatggcgccgatcagcaggccctgcatcagcggcaggtcgaacagccaggctgccgccaggccggtcaggcccgaggtgatcacgacgcccgcagtggccagggaaaacgccggccagagcgcgacgcggaaggtagcggcgcgggtacgcatgccgccgtcgagcagaatgattgccagggccaggttgctgatcaggaaggccagcgagtagtcgtcgaagacgatgccgccgatgccatcgacgcccgcgagcatgcctaccgccaggaatatcaccagaatcggcacgccgaggcgcgtcgacagcgagctcatgagaatgctcgccgcaaccaacagggcaccgacaaagaacagttggttgatgtggccgatatccaagcgcgcgctccgtgggttagtgccgctgacgaacaggcagggcgcatgccagcgattctaacccgctgatttgacgtgctgtcaaaaaacgatcggcgagcagggggcgttatgctgaggtcgccgtggcaacgatcggatgcagatcggttcgagggtttgcgcctgcgccggagtgggtgatgggttgcacccatcctacggaagcggcaaacgtaggatgggtgactaacccatcagtcggcaggcgactgatgtcacctgcataagcccatcattcaggctttgggcttgagcgatttgtcggcttccagcctggtaacggctagaaccagctgtcctgcatgctcaggcaggtatcgtcacgaccggccagcaagtccagctcgtgatggcagctgggtacttcccaggtcaggaagtagcgcgccgcttgcagcttgccgcgatagaagtcgacgtccgcttcgttgccgttcgccagcccttgttccgcgcgaatcgcctgctccagccaacgccagccgatcacggtgtgcccgaacaccttcagatacagcgccgagttggccagtgcctggttgatcttgccggccatgaggtcgccgagcagggcttgggtgacctcggtcaggcgcgccagcaattgctccaatggctgacgcagcgcatccagcgaaccgaactcgccggcgcgcttgcaggtgtcctggatcaggccgagcaactggcgcagcccggcgccaccgttctgcgtcagcttgcgcgccagcagatcgagcgactggatgccgtgggtgccttcgtggatcggattcaggcggttgtcgcggtaatactgttcgaccgggtattcgcgggtatagccatggccgccgaggatctggatcgccatctcgttggccttgaggcagaactccgacggccaggatttgacgatgggggtcagtaggtccagcagctcatgggcgttcttgcgctcttgctcggttgtcgcggtctgctcttcgtcgacgatgcgagcggcgtagaggccgagatcgaaggcgccttcgacataggctttctgcatcagcagcatgcgtttgacatcggtgtgctggatgatcggcacctgcgccgacgccgggttcttgccgtccggcaggcgaccttgcggacgttcacgggcgtagttgagcgagtacaggtagccggcgtaaccgagcatgatcgcgcccatgccgacaccgatgcgcgcgtcgttcatcatctggaacatgtacgacaggcccttgtgcggctcgcccaccaggtaaccgacacagttgccgttgtcgccgaagttcagcgcggtcgacgtcgtgccgcgccaacccatcttgtggaacagcccggccaggatcacgtcgttgcgctcacccagcgagccatcgtcgttgaccaggaacttgggcacgatgaacaggctgatgcctttcacgccgggcggggcgtccggcagcttggccaggaccatgtgcacgatgttctcagatagcggatggtcgccgccggaaatgaagatcttgttgcccttcaggcgataagtgccgtcaccggccggctcggcgcgggtgcgcaggtcggacagggaagagccggcatgcggctcggtcagcgccatggtgccgaagaaacggccttcgagcatcggctggaggaagcgctgcttttgctcgtcgctgccgaacacttcgatcaggtgcgaggcgcccatggtcagcatcggatacgaggaagtgccgatgttggccgcctggaaatgcgcgaagcatgcccgcgagagcaggttgggcagttgcatgccgccgtcctcgaagctgcgcgacgcattgtggaagccggcctcgatgaaggcgtcgaccgccggcttgacctcgggaatcagcacggcctcgccgtccttgtagatcggctcgttttcgtcggccttgcggttgtgcggtgcgaagagattctcggcaatgctgcgggcggtgtccacggcagcattgaaggtttcgcggctgtgctcggcgaaacgctcgcgctgggtcagggcctcggcatcgagcacttcgtaaagctcgaaggccaggttgcgtgggcaaagcagagtctcgggcatgacagttcctccggtgttatgcgagcgagtctaaggagccgccgagacagatgcctagcaccatacattcgagtgataaagcgacacagagatgccttctggggcttgtgcggccccgttcagtgtggccttgcacagaaataatcgagcaactgcgccagatgaccgctaccgatacccgcgccgatcaggtgctgctcggcgcacgccaggtgcgcttctatccgctgacgagccgcgtctcgaccaagcagggcgatcacggtgctcttgcccgtatccttgccggcgtccttgccgctttgctgggggctgagcccatcggcaagatcgtcgagcagttggaacgcctggcccaattcagtggcgaatccgtcgagatggtggcggcaggctacgcttgcgccggccagtagcgcggcgaatcccaccgcagcggtgaacagcgggcacgtcttcaggcaattggaatgggcgatggcctcgagcggccgtgcatgcttgccctcgcgcagatcttggaattgaccccggctcaaaccttgcgagccggtcgcctgggcgagcagttgcaccagctggttgcggatgtccgcagcgatgccctgggttgacgcggctatgttgaaagcctggctgagcaatgccacggaacccagaacggcaacatcctcgccgtactgccgatggatcgtgggcctgccgcgtcgcatctcggcgttgtccatgcacggcaggtcatcgagaaacagcgaggcggcgtgaaccatttcgagcgcgcacgccagatcgagcccgacggctgtggcctgctggccttgcagatccttcaaggccagcatcaggagcagcgggcgaacccgcttgccaggtgcgagggtcccttctcgcatggcggccgcgagtacgtccggtagcggcgtctggggtaaccactggtcgagcctttcgtcgatctgcgcacgtaacgctcttaccgtctggtcgaaatcgtgttgcatgttcggcaaggcagtggccacggtgacctcctggttcggactcttaaaatcgtgacagatcttgtacattatgggtgcgcatgtacaggtccggcacttttaatgaccacattcgtcaacataaggtcatcgagcgaggcgctgcatgaacgacgaaatgattgcgggacgtaagaatgaccatctggatatcgtgctggaccctaatcgtgcgggttcgacggtaagcgctggctatgccgctctgaccttcgaacattgcgccgcgccggagttgcgccttgacgatatcgatattcgcgccgaactcttcggccggcgactgggagcgccactgctgatcagttcgatgaccggcggcgcggcacgggccacgcaaatcaaccgcaacctggccgaagccgccgaggcgttgggcatcgcgcttggcgttggctcgcagcgcatcgcactggaaacaggcgcagaccaggggcttacccggcagctgcgccaactggcgccgagtatcccgctactggccaatctcggcgccgcgcagttggttgccggctacggcctggagcaggcgcaacgggcggtcgacatgatcgaggccgatgcgctgatcattcatttcaatccgttgcaggaggccgtgcaattgggcggcgaccgggactggcgcggtgtgctgcaagcgatcgaaaccctggcggcgcgactgccggtgccgctggtggccaaggaagtcggcgcggggatctcaccgagggtggcgcagcgattgctcgaggctggagtcgcggtcatcgatgtcgccggggccgggggcaccagctgggcagccgtcgaagccgagcgccagcccgacccgcaacagcgcgccatcgctcaggcctttgccggatggggcatacccagcgcccaggcgattgcctcggtgcgtcgtgcctgtccgggggcccggttgatcgcctcgggcgggattcgcgatggcatcgacgccgcgaaggcgatccgcctcggtgccgatctggtggggcaggccgccggcgtgctggacgccgcgctgatcggaccgcaggcggtcgtcgatcatttccaggtgctgatccagcaacttcgcatcgcctgcttctgcaccggttcggctgatctggcagagctggcgcgggcgccgctactgccggccttcgatccgagcaaaccctgatgcgatcgctacgcggtgccgccgattggacggacgcgcctcgatgagacacttcgcggtgatttcgccccccttcctcagccatctgcgtgccatggaggccatcgcctgcgaattgctcgaccgggggcatcgggtgaccgtcgtgcaacaggccgacgtcgccgcagtgctaaggcatccggcagtggcgttcgcccaggtcggtgcgaggtcgcatccgcctggctcgctccaggcggtgatcgagcgtgccgcacggcccggcgggccatggggcatacgccgcgtgattgccgatatggcctcggcgaccgagatgttctgtcgggatgcgccagccgtgcttcgcgccatcggcgctgattgcgtcatcgccgaccagatggagccggccggtgggcttgtggccgagcatctcgggctgccattcgtgtcggtggcctgtgcgttgccggtcaatcgcgaagcgcgggtgccgctgccggtcatgccctggcgctatcggccgacgccctggggcgagcagctgaatctgcacagcagcggcgtctatgaccgggccatgcaggcgcacgccgcggtcatcgcgcggcatgccgccgcgtttggtctgccgcctcgccagcgcctcgatgaatgcctgtcaccgctgctgcaactgagtcaaacgacgcccggtttcgattttccgcgtaccgcgctgcctgaacatttccgcggcgtcggccccttgcgttcgcccttgtccgccgagccgccgatggatatcccggtcgccaccggcaggcctttcgtgttcgcctcgctgggcacgcttcagggtgatcgcttcggcctgttccagcggatcgccgaggcatgccacgagctggacgtgcaactgctgatcgcccactgcggtcgtctcgatgcggcgcaggaacgaggactgctcaacgccggcgccagctgggtcaccgatttcgcgccgcagcgtgcggtgttggcgcgggcggatgcgctgatcacccatgccgggctcaatactgtgctcgatgctttggaagccggggtgccgagcctggcgctgccgattgctttcgatcagcccggcgtcgctgctcgggtggtgcatgccggtgtcggtttgaaactcgatccgcgtctggccagccgtcgccgtatcgtgcaggggctgcgccggctgctacgcgaacccggttttgcacagcgcgcgaagaaactgggcgaagaggttcgcaccaccggtggcgcgccgcgggcggcgcagttgatcgaggcggtgctcaaggtcgagtcgccaatcttgcggagggccgagcatggttgatgcggacctgattttcgtcggcggtggtctggccaatgggctgctggccctgcgcttgcgccacgcgcgaccggatttgcggctgctgatcatcgagcggggcgaaaccctcggcggcaaccatacctggtcctttcatgagcatgacctgacgctcgcgcaacgggcctggctggagccgctggtggacaatcgttggcctggctacgaggtgatttttccgaatcttcgacgtcggctcggcagtggttatgccagcattttctccaatcgatttcatcagctgctgatgtcggagctcgcagacgggatgcgcctgcacacgacggtcactcacgtcgagccccgacaggtacggctgggcaccggcgcggtgttgcgtgcaggggcagtgatcgatgggcgcggcgtgcgccggaccgaccgattggcgctgggcttccagaaattccttggtcaggagttgcgcctgcacgcgccgcatggcttgcaggagccgatcatcatggatgccagcgtcgcccagcaggacggctaccgcttcgtctatgtgttgccgctcagcgccgacaccctgttgatcgaggatacctactacgccgacggcgacgccgttgcgctcgatacgttacgcgacaacatcggccgttatgcctcggagcgtggttgggctatcgccgagacgctgcgtgaagagcagggagtgttgcccatcgtgctctccggcgatctgccggccttttgggacgaggcccgcggcgtgccgcagacgggcctttcggccgccctgttccatcccaccaccggctattcgctgcccgatgcggtgcgcctggtcgatcatctggttgtgctgaaccaatgggacgccgacagcctgttcacggcaatccgcgactattcgctgctgcagtggcgccagcgtgggttcttccgcttgctcaaccggatgttgttcatggccgggccggcagatcgccgttgggcggtgatgcagcgcttctaccgcttgcgtgaaccgctgattcagcgcttctacgccgccaatctgaccacctgggaccgcttgcgcatcgtctcgggcaaacctcccgtgccggtgggcgaagcgcttcgagcgctggcggccggcaatctgcaccacaaggacaaacgatgaacgaggcaactggcggtgtgaagcgggcggtggtgattggcgccggtttcggcgggctggcgctggcgattcggctgcaacgcgccggcatccagaccacggtactggagaagcgcgacaagccgggcggccgcgcctacgtctatcacgaccagggctttaccttcgacgccggcccgaccgtgattaccgatccatcggcactggacgaattgttcaccggcgctggcaagcgcatggccgattacgtcgagctgctaccggtcagccccttctatcggttgtgctgggaagacggttacagcttcgattacgtcaacgatcaggcccagctggaccggcagatccatgcgctaaacccaaaggatgtggctggctatcagcgctttctcgcctattcacgggcggtgtacgaggagggctacgtcaagctcggcacggtgcccttcctgtcgttccgcagcatgatcggcgtcgcgccgcagctggccaaactgcaggcctggcgcaatgtgtacagcatggtggcgaagttcgtggagaacgagcggctacgccaggcgttgtcgttccactccctattggtgggcggcaacccgttcgagacctcctcgatctacgcgctgatccatgcgctggagcgccagggcggcgtctggtttccccgcggcggcaccggggcgctggtgcagggcatggtcaggctgttcgaggacctgggcggcacgctggcgctgaacgccgaggtggcgcgtatcgaactggccggcggcaaggcgagtgcggtgatcaccggcgacggccgtcgcttcgacaccgatgcggtggcctccaacgccgatgtggtgcacacctacaaacagctgctcgggcacgagacgcgcggtcgcgacgaggccaagcggctctccggcaagcgcttttccatgtcgttgttcgtgattcatttcggcttgaaacgtcgccacgagcacctgcagcaccatacggtgtgcttcggtccgcgctaccgagaactgatcgacgagatcttcaagcgcgaaaccctggcggacgacttctcgctctacctgcacgcgccgtgcgtaactgacccctcgctggcgcctgaaggttgtgccagtcattacgtgctggcgccagtgccgcacctgggcacggcgaacatcgactgggcggtggaggggccgaaataccgcgaccgcatcttcgaatatctcgagcgccactacattccgggattgcgcgaggatctggtgacccaccggatcttcacgccgcacgattttcgcgatgaactgaacgcgcatctcggctcggcattttcgctggagccgatcctcacccagagcgcctggttccgcacacacaaccgtgatgacgtgatacccaacctctacatcgtcggtgctggcacgcatcccggtgcgggtgtgccgggggttgtcggttcggccaaggccacggccggcctgatgctggaggatttcatgctggagggacaggccggatgaacgatcaggtcatcgatcactcgacgcaagccatcaacgtcggctccaagagctttgcggcggcggcgaaactgttcgacgagcgcactcgccagagcgcggtaatgctctacgcctggtgtcgtcattgcgacgacgtgatcgacgggcagaccctcgggcacggccaggtcgacggggatcgttccacaggcgaagcgcgccttgccgaactggttgatcggaccgagcgcgcctatgccggcgagccgatgcaggacccggcatttgcggcctttcagcaggtcattcaacgccaccagatacccaaagcgtatccgctggagcatctggcgggctttcgcatggacgtgcagggctaccactaccagaccttcgacgacacgctgctgtactgctaccgcgtcgccggggtggtgggcctgatgatggcgcgggtgatgggcgccgaggcggaggcgacgctggaccgggcctgcgatctgggcctggcgttccagctgaccaatattgcgcgggatatcgtcgaggacgcagcgatcggacgcgtctatctaccggccgactggctcgcggaagcgggcatccccgctgatggggtcggcctgctgcacaagcggccggcgctggcgctgctctcggcccgtctggtcgatctggccgagccttattacctgtcggcgtcgcagggtttgcgagacctgccattgcgctcggcctggtcgatcgccaccgcccatggcatctatcggcaaatcggcgttgaggtgaaagcgcgcggcgcggcggcttgggactcgcgagtctccaccagcaaggggcagaaattgcagttcctgttgggcggggccgtgctggcgctggcttcgcggcggatgcaggtcaggccgcgtcctgtttcgctctggaagcgtcctcgctagcagtcaccttgcgcagcgggccatcatgcagctcgcgcagctgctgtttgagcaccggcagcggcggcgcgtagaggaaaccgaaggatacgcaacgctccttgccttcgacggcatggtgcagccgatgcgcctggtagagccgcttgagatagccgttgcgcggcacatagcgtagcggccagcggtgatgcacgagcccgtcatgggcgacgaagtagaggaaaccgtaggctgtcatcccggcgccgatccattccagcgggccgtagcccgccgtgcccagggcgatcagcaggatggcgaccccggcgaaaaccaccgcgtacagatcattcttctcgaaccagccgctgcgcggctcatggtgcgacttgtgccagccccacccccagccgtgcatcacatacttgtgagcccaccaagcgaacagctccatgccggccagggtggcgagaaataccagtgtgttggtcagcacggtcatgtccgatccgctcatctgcaggtcgcgccagtttacgcgctacgccgcgccagtcgacccggcgccgacgcctggcgcgtgtcggttagcgccagccggccgccagggcttccgtcagttgcgccgcgggcacagcctggcaaccactggcattttgtcccgcccagagcggtgagaaatggtcgacgccctgtggctcggcggcggcgcgcaagctgccgatggcgttgccggccagcggaaacgccggcacggcgtctggccgggcgcccagttcgcggatgaggcggttgacgatgccgcgggcgggccgtccggagaacagggtggtcagcacggtgtgttcggcgaacgggctctgcaaggcttggcggtgcagcgggctggcgcggctttcgtcgcacagcagataagcagtgccgacttggacgcctgccgcgccaagtgcctgcgccgcggctacgcagcgggcatcggcaatcccgccggcggcgatcacgggcacgtccagcgcggccaccagctgcggcagcaaggcaaaggtgccgacctgaccatcgatatctccgctgagaaacatgccgcgatggccgccggcttcgacgccctgggcaatcaccgcgtcgacgccttgctgctgcaaccagcggccttcttccagcgtcgtggcgctggagatgatcttcgcaccggtcgctttgacccgctgtagcagctccggcgcaggcaggccgaaatggaagctgaccacaggcggacggtgccgctccagcacgtcggccatgccggcgtcgaacggcttgcgtgttgcgccagttgggatgctcgccggatcgatcgccagttctttcaagtagggcgccagcagtgccagccaggcctcggtgcgcgcggcgtcctcggtaggtgtctggtggcagaagaaattgacgttgtagggcttgcgggtcagcgtcgcgatggccgtcagttcggcatcgagcgtctcggcattgagcatgccggcgggaatcgaccccagtccgccagcttcggacaccgccgccgcgagctgatggttttgcgaaccggccatcggtgcctgaatcacgggcaagctgatctcgaaaaggctgcggatatccatcgaaaactcctcgtcggctgggcagagctgcaactgtatcagccgtttgtcgaggatttacaaccaaggttgcggcgcgcctcgccggccccctgcgaatcgccgcgttgcgcagttagactgtgcgcacttcaggagtgcccgatgaactaccgccacgctttccacgccggcaatcacgccgacgttttcaaacacctggttttgtcccgtctgttcaccatgctggcgcgcaaggaggcgccgttcgcctatctcgacagccacgcgggcgtcggcctgtatgacctcgccggcgaccaggccagccgcaccggcgaatggctgcagggcatcgcacgcctgtggcaggcagagaacgtcccagcgatggcgcagggatatctcgatgtgatccgtgcactcaatcctgacggcacgctgcgttactacccgggctcgccggagctggcgcgccagctgacgcgtgagcaggatcgcctgcagctcaacgagaagcaccccgaagatggccgtctgttgaaagacaatatggccggtgaccgtcgcgtagcggtgcatctgggcgaaggctggcacgtgccgcgcgccttgatgccgactgccgaaaagcgcgtggtgctgttgatcgacccacccttcgaacaggtcgacgagctgagccgctgcgtgcaggcgctgaccgatgcgctgggacgcatgcgccagactatcggtgtgatctggtatccgatcaaggatgagcgtcagctcaagcgcttctatcaggacctgtcgcgtagcggcgcgccgaagctgctgcgagccgagctgttcgttcatcccactgacgaggcgctgcggctgaatggctccggtttggccatcagtaatccgccatgggggctggaagaggagttgcgtgagttgctgccgtggctggctaagttgctcggccagagcgagggcggctggcggctggattggttggttgaagagcgtaaagccgaataagagcgctggaggctggaaggctggacgaggctcgtcgggtggatgtcggtttttacatccgccgagcatggttggtggggcgccatccggtgggccgccacccggtggaacgccaccctacgaatcgtccagcctccagccgccgctagaacagcttcaacggttcttcctgcagtgccgacatttgttcacgcaggatgagcacttggtcgccccagtaccgttcgctgccgaaccagggaaagctcatcgggaaggccggatcatcccagcggcgtgccaaccaggcgctgtagtgcatcaggcgcagagcgcgcagggcttcgatcagcggcagttcccgcggagcgaagtcgtggaactcgttgtagccgtccaccagctccgatagctgtccgagccgctcgtgacgctcgccggcgagcatcatccagatgtcctgcacggacgggcccatgcgacagtcgtccagatcgaccaggtggaaggcgtcatctcgggcaagaatgttgccggggtggcagtcgccatgcaggcggatcggctgaaagtcggtgcgggcgaaaacgtcatcgacacgcttcaataggtcgcgcgccaccgactcgtaggcaggcagcaggctctttggcacgaatccaccgtcgagcagcgtcgccagcgactcatggccgaaatgttgggcattgagtgtttcccggtgctcgaaggggcggctggcgctgaccgcgtgcatgcgacccagcagttggccgaggcggtagagctgatccaggttgcccggctccggcgcgcgaccgccgcggcgggggaacagcgcaaagcgaaagccggcgtgttcgaacagggttttgccgtcgcgctcgaatggcgccacgactggaatttcgcgatcggccagctcccaggagaactgatgctcctcgagaatggcctcgttactccagcggccggggcgatagaacttcgccacgatcggcgtctcgtcctcgatgcccacttggtagacccggttttcgtagctgttcaatgccagtacgcgagcgtcgctgatgaaaccggcgctttccaccgcatcgagcacaaggtcaggcgtaagcgtgtcgaaggggtggctcatggtcggctccgtggacggggccgccagtgtattgcactggcgtgtttacacaaccgcagtcctggctagtcgccgggcttcggtgttcgcgccaggcaatagacatcgacgcgtacggcgccagctcgcttgagcaggcgggccagggcctcggcggtggcgcccgtggtgagcacgtcgtcgatgattgctagatgacgcccggcgagtttttggtcgtccgtcaaagcgaacgcctgacgtaggttccgccgccgactggcggcgtcgagctcctgctgcgattgagtgtcctggacccgctgcaacagcttcttgtcgaccgggatcgccaaggccgcgctgagccaatcggtaagcatctgggcctgattgaagccgcgctggcgataccgtttgcgggccaggggtaccggcaaaagcgcatcgggacgtggcaaaccttcattgaacgcatgctgcaaatgctgcgagaggcgctccgccagcagccggccgagcggccattgtgcttggtgtttgaagcggctgatgagcgtgtccacagggaaggcgaagcgccacggtacgatcacccgatcgaacgcgggtgggcgcttcaggcattcaccgcagatcaggccggacgcaggtaacggcagggcgcacagggtgcagtgctcgcgcagccagggcagttctgcttcgcaggccccacaaaccgattggccggtttcacagcgctcgtcacagagcgaacagtggtgttcaatatttagccagttgtaaaccatgattcctttcctggttgacagcgcctcggccttggctaaccatttcgcatccgtgccaggccgccgagccgctatttattacaaggaatgcccatgagcgccactgccgcttccgttacccgtcacgactggagcctcgccgaagtcaaggcgctcttcgaacaacccttcaacgacctgatcttccaggctcaaggcgtgcaccgccagcatttcgatgccaaccgcgtccaggtttcgaccttgctgtcgatcaaaaccggcgcctgcccggaagactgcaagtactgtccacaatcaggccactacaacaccggcctcgataaagaaaagctgatggaagtgcagaaggtgctcgatgccgccgccgaagccaaggccatcggctcgacgcgcttctgcatgggtgccgcctggaagcacccgtccgccaaggacatgccctatgtcctgaagatggtcgaaggtgtgaaggcgctgggcctggaaacctgcatgaccctcggcaagctcgaccaggagcagacgaaggcgctggcggccgcgggcctggactactacaaccacaacctggatacctcgccggagttctacggcaacatcatcaccacccgcacctatgccgaccgactggaaacgctcagctacgtccgcgatgcggggatgaagatctgctcgggcggcatcctcggcatgggcgagtcgctggacgaccgcgccggtcttctgatccagctggccaacctgccggagcatcccgagtcggtgccgatcaacatgctggtcaaggtcaagggcacaccgctggccgatgagcaggacgtcgaccctttcgacttcatccgcatgctcgccgtggcgcggatcatgatgcccaaatcccatgtgcgcctgtcggccggtcgtgagcagatgaacgagcagatgcaggccctggccttcctcgccggcgccaactcgatcttctacggagagaagctgctgaccaccggcaacccgcaggccgacaaggacatgctgctgttcaagcgcctgggcatccagcccgaagcgcgcgaagagcacgacgacgaagtgcaccaggccgccatcgagcaggccctggtcgagcagcgcgattcgaagctgttcgttaacgcggcgctataaaagccgctgcaggctgcaggcgacaggctacaggccggtcaaggccgcgcctgaagcctatggcctgcggcctggagcctgtttttatgcctttcaatctcgcttcccgcctcgccgcgcgccgcgccgcgcacctctatcgtcaccggccgctgctggaaacaccgcagcagccggaggtgatggtcgatggcgaacagttgctggcgttctgttccaacgattatctggggctggccagccatcccgaggtgatccgcgccatgcagcagggcgcggaacgctggggcgtgggcggcggtgcgtcgcatctggtcatggggcacagcacgccgcatcaccagctcgaagaagccctggctgacttcaccggccggccgcgggctctgctgttctccaccggttacatggccaatttggcggccgttacggcgctagtggggcagggcgatacggtcctggaagaccgtatcaaccacgcttccttgctcgacgcaggtttgctcagtggcgcgcgcttttcgcgctacctgcacaacgatgccgacagcctggccaagcgtctcgacaaggccaccggcgatacgctggtggtcaccgacggtgtgttcagcatggacggcgatctggccgacctgccagcgctgtgtgccaccgcaaaggcccgaggcgcctgggtgatggtcgatgacgcccatggcttcggcccgctgggcaaaaccggtggcggtatcgtcgagcatttcgggctgggtatcgatgacgtgccggtgctggtcggcacgctgggcaaggcgttcgggaccgcaggggctttcgtcgccggcagcgaggagctgatcgagacgctgattcagttcgcccggccctacatctacaccaccagccagccgccggcggtcgcctgcgccaccctcaaaagtctcgaactgctgcgcgcagagagctggcgtcgcgatcatctgaacagcctgacaacgcgtttccgccagggcgcggccgagatcggtttgacgcttatggacagtccgacgcccattcagccgattcttgtcggcagcagcgagcgtgccctgaaactctctgcggcgctgcgtgaacggggtgtgctggtcggcgccatccgccctccgacggtgccggccggcagcgcacggctacgggtgaccttcagcgcgtcgcatagcgcagcccaggtggaacgactgctggatatcctggccgaatgctggaatcgattggccgaggagcctgaagcggatgcgtgaacagctgattttgctgcccggatgggcgtttggcccggcggcgttgcagcccttgtccgaggcgcttatagagctcgcgccggaactcgacgtcgtcatcgaacccctgcccgaactggccgaggccaacgcctggctcgacgagctggaccgtcgccttccccgcgacagctggctggccggttggtccctgggcggcatgctggccgcgcagctcgccgcgcggcgtgtcgatagctgccgcgggctgatcaccatcgccagcaatccctgcttccgtgcccgaccacagtggcccgaaggcatggccccggatattttcgatgcctttcatgaggcgttcaggctcgacccgcaggagacgttgaagcgcttccgctcgctatgcagtcgcggtgcctacgatccgcgaacgctggcgaggcagttgcaggtcagccacgccgaactgccggtcgccgtactggacgccggcctgcagttgctggccgaactcgatgggcgcgccgcgctgcatggctatttcggcccgcaactgcatctgttcgcgggcaacgatgcattggtcccggcgtcggcctgcgccgcgctgcagcgctggatgcctggcatcctggccgagctggtgccgggatccagtcacggtcttccgctagagcgagccgacgacatggcggcaacgatcgcggcattcataaaaggcaaagtctgatgaacgaagtggccacggcagtggtgcctgatgaggaacacagcctgcctgacaagcgtcaggttgcggcatcgttttcccgcgcggccgccagctacgatgccgtggccgagttgcagcgtacggtcggtactgcgctgctggagcgtctgccctcgacattggtaccggcgcgctggctggacctgggctgcggtacgggttatttctcgcggctcctggcgagtcgtttcccggccggtgaaggcatcgcactggacatcgccgaaggcatgctgcgccatgcccggccgcagggtggcgcgagccgtttcattgctggcgatgccgaatgcctgccgctgcgtgatgcgtcggtggagctgatgttctccagcctggcgctgcagtggtgtgaagactttcccgccgtgctgagtgaggcgaagcgggtgctccgccctggcggggtgctcgcctttagcagtctgtgcagcggcaccttgcgggagctgcgcgacagctggcaggcggtggacggttttgcccacgtgaatcgcttccggccaattggcgcctatcaacggcattgcgccgccagtggtttgcggctggagcggttggaggtcgagccccaggtgctgcatttcgccgagctacggcagctgaccggcgagctcaaggcgctcggcgcgcacaatctgaaccctggccgtccgggcgggcttaccgggcgcgcacgtattcgcgcgttgattgatgcctacgagcggtttcgtacgccgcgcgggctccccgcgacctatcaggtggtgtacggcgtgttgcgcaaggagctgaaatgaacgcggcatatttcgtcaccggtaccgacaccgaagtcggcaaaaccaccatcgctgcggggcttctacatgtggcgcggcgggccgggctcagcacggctgcggccaagcctgtggcatccggttgcgaaatcactgccgaaggcctgcgcaacagcgacgcgctggcgttgcttggcgagtgcacgctgccgctgcgctacgagctggtcaatccgctggctttcgagccggcaatcgccccgcatctggcggcccgcgaggcaggtgtcgaattgaccgtggcggcgctggctgcaccggttcggcaagtgctggcaatgcaggcgcagttttccctggtggagggcgccggcggctggcgcgtgccgctggccggagacgaagcgctgtccgatctcgcgattgagctcggtctgccggtggtcctcgtggtcggcgtgcgcctcggctgcatcaaccatgcgctgctcagcgcagaggccatcgagcgcgacgggctgaggatcgccggctgggtcgccaacatcgtcgaaccagctacctcacgcttgcaggaaaacctcgcgaccttggctgaacgactcgaggcgccatgcctcggtcgggtgccacacctgtcgcctgcaagcccggccgaggtcgcgcgctacctcgacctggcgccgctcagggcttgaagaccgcccgcatgcactgttcggtcttgtgcttgaacaacttgtagccctccggtgactgctccagatccatcgggtgcgtcagtagataggaaggatccatttcgccgtcgaggatgtgctggaagatgcgctcggcgtagcgctgccccggctgctgccccgagcggaccgtcagcgccttgttgacgatggcgcccatggggaacttgtccatcaggccgccatacacgcccagcaccgacaccgtaccggctttgcggcatgagtgaatggcctggcgcaatgcgacgccgcgttcggtgtgcagccgcagctgttgcttgaccttgtcatagacgtgttcgatgccggtgccgtgcgcttccatgccgaccgcgtcgatgcagcgatccgggccgcgcccaccagtgagttccagcagcgcttcgtgcacgtcggtggtttcgtagttgatggtgatggcgccggcttttgtctcggccagcgccaggcgatcagcgaaacggtcgatggcgatgacgcgctcggcgcccatcaggtaggcgctgcgaatggccatctggccgacgccgccgcagccccacacggctacggtatcgccgcgctggatgtctgcctggtcggcaccgaaatacccggtcggcgcggcgtcggatacgaacacggcctgctcgtcgctcacgccttccggcaccttgaacaggttcacttcggcatagggcacgcggatgtaggtggcgtggctgccggcatagccaccgaaggcgtggctgtaaccgaagatacctgagcaggtgtagccgtatgcgatttcggtctcggggctgttggggtttgagttgtcgcagcagttgaaattgcttgccttgcagtggctgcactcaccgcagccgatgatggaaatcgcagtcacgcgatcgcccttgctgaagcgcgtcacggcgctacccgtctccaccacctcgccaaggaactcgtggccgaggatgtcgccgggatgcatcgtcggaacgtagccgtcgaccagatgcaggtcagagccacagaccgaggacatgatcaccttgagaatcacgtccttcgggttgacgatctgcgggtccggtacggtgtcgacttgcagcatgttcgggccttgccaggtcaatgcgcgcattatcgagcctccccggtcgctgcgatgccggtgtgcttgtcggccggttcgcggttcatctggccggtcgagatctcgccggtctccatcagttgcttgaagcgacgtagattctgttcggccttgaagccgctgaacttgctgacgccacgggccagcgcataccccaactgcccgccagggacttcatgtgcaaccaccgcctgtatctcggtaccgctgccattgggcgcctcgcgaaaggtcacccaacccaggttgcggacgggcgcgttgggttcggacatccacgccagccgctcgccggggatgtcctcggtgacataggtgtcccactcgatgctcttgtccatcatcggcacgcgcgcgacccagtgggcatggtggtcgtcacgggtctcgacacgttcgatgaactccatgaaggtcggcatgttgctgaagtcgcgccagtagcggtaaacctcgtcgcgggggcggttcaccgtgatgcttgtcgacaaggcccgggcgcggccccagtgatgctcatccgccagttggctttcatagggcgtcggcgacaacgcgcgcttggcattgcactggcctgaaccgccgcgggcgatcgccatgccgcctgcggccagttccagcagacccaggacgcctcctttgcgcaacccgcgcgccaccagccagccgcccagcaggccggacaccaagcgttcgacaccgtggagattgggatcgccagttcgaccaggggcattgcgggtggagattagcggcgagtgcgacgggttcatggttgtctccaaattgaaggctgtcgaatagctgactgccttctcttcgccaccgttccagcgcccgcaatccctccgatgaacgtgatttcacgccaggaatgaaagagcgattgtttatagcgacatgcgactggcgccagcgaaacggctctgcttcaatgatggccaagtgtcttcggtgggaattgaaccatgcagatcaacaaccttctggctgccggcctcggggcgtatcaagccggacagcagcgtgttgaccaggccagtgctgccataggggatttcaccctgccggctgccgaaacctcccaggcggtggccgataccgtcgagctgaccgagcagctcatagaaatgaaagtcggcgagcatcaagccaacgcgggtgcccggctcctgcagtctgccgacgaagtcctcggcacgctgatcaacaccaaagcctgacttactccggccggcctctctggccggctgtctcgcccgaattcgcgcgagccaatcttgcctgtgaatatccgatgccgacgaatggcgtcatggccgctgcttgacatcgttcaggcctaaacgtatgtttcaaacgcctgtttgacctgccggagcgacgccggagggtccaatcgaaatcaagcgtggctgatctgccagtcacctgaaccaagaacccaccgctgaggtttacgctatgcctgactacaaggcccccttgcgcgatattcgctttgtacgtgacgaactgctcggctacgaagcgcactaccaaagccttccgggttgtgaagacgccaccccggatatggtcaatgccattctcgacgaaggcgccaagttctgtgagcaggtaattgcccccctcaaccgcgtgggcgacatcgaaggttgcacctggagcgaaagcggcgtgaagacgccgaccggcttcaaagaggcttatcagcagttcgtcgaaggcggctggccgagcctggcccatgacgtcgaacacggcggccaggggctgccggaatcgctgggcatggccatcagcgagatggtcggcgaagccaactggtcctggggcatgtatcccggtctgtcccacggcgcgatgaataccctgcatgagcacggcacgcccgagcagcagcagacgtatctgaccaagctggtttccggcgagtggaccggcaccatgtgcctgaccgagccgcattgcggcaccgacctgggtatgctgcgcaccaaggccgagcctcaggcagacggcagctacaaggtgtccggcaccaagatcttcatttccgctggcgagcacgacatggccgacaacatcgtccatatcgttctggcccgcctgcccgacgcgccgcaaggcaccaagggtatttccctgttcatcgtgcccaagttcctgccgaacgccgaaggcggcgtgggcgagcgtaacggtgtgtcctgtggctcgctcgagcacaagatgggcatccacggcaacgccacctgcgtgatgaacttcgacggcgccaccggcttcctgatcggcccgccgaacaaaggcctgaactgcatgttcaccttcatgaacaccgcgcgtctgggtaccgctctgcagggcctggcccacgccgagatcggcttccagggcggcatcaagtatgcgcgtgagcgcctgcagatgcgttcgctgaccggtccgaaggcgcccgagaaagccgctgacccgatcatcgtgcatccggatgtgcgccgtatgctgctgaccatgaaggccttcgccgaaggcaaccgcgcaatgctgtacttcgccgccaagcaggtcgatatcgtccagcgcagccaggacgaagcgcagcgcaaggccgccgacgcgatgctggctttcctcactccgatcgccaaggcgttcatgaccgaagtcggcttcgaagcggccaaccacggtgtgcagatctacggcggccacggcttcatcgccgagtggggcatggagcagaacgtccgtgacagccgcatctcctgcctgtacgaaggcaccaccggcatccaggcactcgacctgctgggccgcaaggtgctgatgacccagggcgaagcgctgaagggcttcaccaaggtcgtgcacaagttctgccaggccaacgaaggcaacgaggcggtcaagcagttcgtcgagccgctggccaagctgaacaaggagtggggcgacctgaccatgaaggtcggcatggccgcgatgaagaaccgcgaagaagtcggcgccgcgtcggtggactacctgatgtactgcggttacgcctgcctggcctacttctgggccgacatggcacgtctggctgcggaaaagatcgcagctggcgaagacgccgatggtttctacaccgccaaggtgcagacggcgcgcttctacttccagcgcattctgccgcgtacccgtactcacgtcgaagccatgctgtccggtgctgacaacctgatggacatggacgaggcgcacttcgaactggcctactaaggctcagtgcaacgagaagaccgctgcctcggcagcggtttttttttgccccggctgaggggcgttgatcggtttttgttcacgcagggtgaaataagccggcaaatgcaggcaaaatgccttcaatcctcaagcgctcgaacaccggagccgccttgcctcgtttgagccctgcacgcttcagccacttctacgcccctctggcgctgctcgccggtggattggcggctgctcgtcaaccgagcctgaacgagttcttcacctcgctgttcaacgtattgccgacggtcctgctgctgctcggcggggcgttctgcatcgcctatgcgcggattcgcgagacctgcctgttggcagtcatctacctgagctatttcctgctggacactcaggttgatcattaccgccttaccggcgcgctgctaccggacgccgcgctgacctttcacctgtgcagcttgctgctaccggcgctgtatgggctgtttgcactgtggaacgagcgtgcccacctgctgcaggacggtgtggcgcgcgtggcagtgatgttcgccgtggtggtgccggcatgcgcgttggcgcggcggtttcccgatgcaatgctcaactggctggccgaggttcgctggccgtcgttacaggcggactggctgcaattgatccagctggcctatccggttttcctgctagcgctgctgggcctgctgttccagtacctgcggcggccgcgaccagtgcacgcggctcagctcgtggcgctggtaggcctgctgttgatgctgccccaggtgttcagccgtccgggggcgctcaacgtcttgagcagtctggtgatgctggcgctggtcgttgcggttgcgcaggaggcctaccagatggcctttcgcgacgagctgaccggcttgcctgggcgccgcgcgctgaacgagcgcttgcaacgcctgggccggcagtacgtgatcgcgatggccgatgtcgatcgtttcaaggcgttcaacgacacccacgggcacgatgtcggcgacgaggtactgcgcctggtcgccagccgtctgcgaaaggtgggcggaggagggcgcgcctatcgttacggcggagaggagttcgcgctggtgtttcccgggagcgatctggagcattgcctgccgcatctggaagccgttcgacaggccgtggagacctatccgctgcagttgcgcgacaagaccaaccgacccagggatgctgcgcaggggcgacagcgtcgcggtgccagcgcgacggcggcggtttcggtgaccatcagcatcggggtggctgagcgaacactgagccagcgcagtccggaggaagtcatcaaacaggccgaccaggcgctctacagcgccaagagtgcggggcgcaactgcattcgctcgcacggcgacaaccgccgcggtgcggtgcgcacggcgaagcgcagcgcggccgacgtgtgacagttatggcgccgcattcagcgcctgcaatgtgatggctcgcaggacgaacagccagtagcgtgcccggcacacatcgctggtgccgtcctggagaacgatatgcccgcttacaaggctcccctgcgcgacatgcgcttcctgatcgacgaagttttcgattttcatggcagctacgccgccaacggtgccgaggatgcgacgccggacatggtcagcgccatcctggaggaaggcgccaagttctgcgaacaggtactcgctcccctgaaccgcagcggtgacgaggagggctgtcacttcgacaatggcgtggtgaccacacccaagggcttcaaggaagccttcgcgcagtatgccgcgggtggctggatggggctggcttcggacccgacctacggtggccagggcctgccgcactcgctgggcctggtgatcggcgaaatggttggctcggccaacacctcgttcggcatgtacccggggctgacccacggcgcgatggcggcaatcggcgcccacggcaccgaggcgcagaagcaggcctatctgacccgcatgaccgaagggcgctggaccggcaccatgtgcctgaccgagccgcactgtggcaccgacctgggcatcatcaagacccgagcggtcccgcaggccgatggcagctacgcgatcagcggcaccaagatcttcatctcggccggcgagcacgacctgagcgagaacatcgtgcacctggtactggccaagttgcccgatgcacccgcgggtaccaagggcatctcgctgttcatcgtgcccaagttcctgcccgatgcgtccggcgaggcgggtgagcgcaatggcgtcgcctgcggctccatcgagcacaagatggggatcaaggcttcggcaacctgtgtgatcaacttcgatgccgctaccggatttctcatcggcgagccgaacaagggcctcaactgcatgttcaccatgatgaaccatgcccgcctgggtacggggatgcaggggctatgtaatggcgaggcgagctttcagggcgcgatccagtacgccaacgagcgcttgcagatgcgcgcgctgactggcgcgaagttccccgacaagccggccgatccgatcatcgttcaccctgacgtgcggcgcatgctgttgacgatgaaggcgttcaacgaaggcaatcgcgccctcgcatatttcaccgcgcagctgctcgatcagatccatagcccggacgcggacaagcgcaaggaggctgaagatcagctcgccttcctcacgccgatttgcaaggccttcatgaccgacacgggactggaagtcaccaacctcggcatgcaggtcttcggcggccacggctatatccgcgaatgggggatggagcaactggtgcgcgactgccgcatcgccccgatctacgagggcaccaacggcatccaggcgctcgacctgttggggcgcaaggtgctcggcagccagggcaaactgatgctcggcttcaccaaacgggtgcacaagttctgcgaagccaacgccggccacccgcagctgcagcgttacgtggagcaggtggcggggctcaaccgcgatctgggcgagatcaccaagggcatcggcatggcggcgatgaagaacccggacgaggtgggcgcggcgtcggtcgattacctgatgtattgcggctatctggtgctgggctatttctggttgcgcatggctgtggtggcccagagccgtctcgagcaggccggccatgatgcggccttctaccagtcgaagctggccaccgccgagttctacttcacgcgtctgctgccccgtaccgcggctcaccgcacggcgatagaggcgggaagtgcgagcctgatgaagttggcggccgatcagttcgcgttctaattcgtccgacagacaggacaacttagcccgcgcctgcgcgggcttttttatctgcagggcggcgactttccggtactgtccgttcaccggggcaatgctgactcactcgtctggatgtggagtctggacgagaaccagttggtcattttaagacgcttcgggcgccggtcggtcttcagttagactcgcgaaactgctgcggccaatcggccgggtgatatgtttctgcgaggtctttctccatggctgactacaaagctccgctgcgcgatatgcgtttcgttctgaacgaagttttcgatgccccgacgctctggcagaccttgccagcgctggcggaagtcgtcgacgcggaaaccgcagaggcgattctcgaggaggcgggcaagatcaccgccaataccattgccccgctcaaccgcactggtgatgaggaaggctgccactgggtcgatggcgcggtcagcacaccggccggctaccccgaggcctatcgcctttatgccgagggcggctgggtgggcgtcggtggtgacccggcctacggcggtatgggcatgcccaaggtcatttccgcccaggtcgaggagatgatgaactccgccagcctggccttcggtctgtacccgatgctgacgtccggcgcgtgcctgtcgatctatgcgcacgccaacgaagagctcaagcagaagtacctgccgaacatgtacgcgggtgtctggtccggctccatgtgcctgaccgagccccatgccggcaccgacctcggcatcattcgtaccaaggccgagccgcaagccgatggctcctacaaggtcagcggcaccaagattttcatcaccggcggcgagcacgatctcaccgacaacatcatccacctggtgctggccaagcttcccgatgcgcccgccggctcgcgcggtatctcgctgttcctggtgcccaagatcatggtcaacgaggacggcagcctgggcgagcgcaacagcctgagctgcggctcgatcgagcacaagatgggcatccaggcctcggccacctgcgtgatgaacttcgacggcgccaccggctggatggtcggtgagccgaacaagggactggcggcgatgttcaccatgatgaattacgagcgcctgggggtcggcatccaagggctttccaccggcgagcgctcctaccagagcgccatcgaatacgcccgcgaacgtatccagagccgcgccccgaccggcccggtcgcccaggaaaaagccgctgatccgatcatcgtgcatcccgatgtacgccggatgttgctgacgatgaaagcgctcaacgaaggcggtcgcgccttctccagctacgtcgcgctgcagctggatatcgccaagttcagcgatgatgcagaagcccgtcagcgagccgaagcccaggtcgcattgctgacgccggtcgccaaagccttcctcaccgacatgggcctggaaaccaccgtccatggccagcagatattcggcggccatggctttatccgcgagtggggccaggagcagctggtgcgcgactgccgcatcacccaaatatacgaaggcaccaacggcatccaggccctcgacctgctgggtcgcaaggtggttggcagcggtggtgagctgtatcgggcgttcgccgacgagattcgcagcttttgcagcgcagcgggtgccgagcaggctgagttcatcgccccgctgcgcgcagcgctggataacctcgacgagcttaccgccttcgtgctcgacagcgccaagcgcaatcccaacgagatcggtgcggcttcggtcgaatacctgcatgtgttcggttataccgcctacgcctacatgtgggcgcggatggccgcggtcgcgctgggcaaggaggagcaggacgacttctacgccagcaagctgggcacggcgcgcttctatttcgctcgactgctgccacgcatccattcgctgagcgccaccgtcaaagctggcagcgattcgttgtatctgctgaaagcggagcagttctaagcgggattaatctgtagcggcataatgaaattaattcgccatgtccgggaacaatgggccactacgccagtcataaacccgcgccatgtagtcaatggcttacaagcgaagccagggatcggcatccatgtaagtcattgcttacaaatcgtagtgcaaaactgccactacaggtcttgtcggcccggcggtagtctttgtgcttggacgctgcgtatggaagcgcatcagaaaaaacaggaagcgtagcggaacgacgccaggaaggcgcaagtcacggatgtcaggattcagtctgcaaaggccccgcttcggcggggttttcttttttcggcgtacaacccgtttttttgctcgttggggtggggcgcgtcacgaccaggctagatggggccaacgtcacgcgggcatgcagacgccggtaccgccgagcccgcagtaacctcccggattcttcgccaggtattgctgatggtaggcctctgcgtaatagaagaccggcgcttcggcgatttccgtggtgatgctgccaagcccatgcttgcccagttcggcctggaaacgtagagcgctgtcgcgtgccgcttccagttgggccgtgtcgaagcagtagatggccgagcgatactgggtgccgatgtcgttgccttgccgcatgccctgcgtcgggttgtgcgcttcccagaacagcctcagcaggtcctggtaggagatctgctgcggatcgaagactaccagcaccgcttcggtatgcccggtgaggccggagcaaacttcttcgtagctcggattcggcgtgtgaccgccagcgtagcccacggccgtggtccagacgcctggttgctcccagaagcgccgctcagccccccagaaacaacccatggcaaagatggcctggcgcaggtgagccggaaatggaggttgcagtgcgttgccattgacgaaatgggcggccggaaccggaacgggcgtggcgcgcccagggagtgcctggccggcatcgggcaaagcctgtttgtggacgagaatttgcgaacgcagggtcatgatggtcctcgagcctgaaagtcggatggccttggttgcctaggctaccaaacggcacgaccaaagcaccgtcggccaaacgttacacctgatgaaaggctcaaagccagtgcgggtaacgacgcagggagttgatcagttggctgccgggaataggcttgtcgaacaggtagccttgaccgatatcgcagcgctgatgccggaggaaggctagctgttcggccgtttcgatgccctcggcgactactttcagatggagattgcgagccatggcgatcaccgcggcggtgatctcgatgtcgtcctgactgtcggggatgtccttgatgaagcttcgatcgatcttgatcacgtcgatgggaaacttcttcaggtagctcagcgaagaatagccggtgccgaaatcatccatcgccaacgtgacgccgagcgccttcagaccgatcagctgttggcgcgtctcctcggtggcttcgagcagcaggctttcggtcagctccagctcgaggctgctcggcggtaaacgctcttcggtgaggatggccgcgatcgaggcgacgagttcaggatcggaaaactgtttcggcgagaggttgatcgcgacctgtggcgttcccaaccccatggatgcgagctgcaagcccatccggcaggcctcgcgagccacccatttgccgatggggatgatcaacccggtttcttccgcaacgccgatgaactgatcgggccggatcatgcctttttccgggtggttccatcgaagcagcgcctccagaccctgtaggcgtccgctgcgcaggcagagcttgggttgatagaagacttcgagttcgttctgcaccagtgcgcggcgcaggttgttctccacgaacagtttgtaattggcttcggcgtgcagggcttcggtaaacacctgtacctgattcttgccgttggccttggccttatgcagggcttggccggcatgcttcatcagcgtttccgggtcgtcgccatgcagcggcgcgcacgccaggcccagcgagccgctgacactgatcagctgtttgtcgacgaacagtggcttgtccagaatccgcagcaccttgttggccagatgctgggcttcttccaggtccatgtcgtcgagcaggagggcgaactcgttgctggcgaatcgcgccagtacgctgtcccgattcagactgttgcgcaggcgccgcgcgaggctggtcaggagcttgtcgccggtctgatggccaaggctgtcattgatgcgcttgaaattgtcgatatccaccaacaacaggcacagacgtggcgctttaccgttggcgaagcgctcttcgatgctacggatgaaaaacggacggttgcccaggccggtcaggttgtcggtataggccaggcgctcgatgtgttgctgcgccaccttgctctgggtgacgtcttcgtagatgccgatgtagtgcgtcagctctccgttctcgccgtataccttggagatcgatagctgaccccagtagggttcgaggttcttgcggcgactgcggaattcgccctgccagctgttgtgctgcgccaggctggaagaggtgtcgaacagcagctcgctgaggttttccagggcggtcagctcggtaagacgtcggccacggacttcatcggccgaaaactgcgtgatggcggtaaagctggggttgacgtaatcgacgatgccattcttgtcgaccaggatgaaggcgcttgcgctctgctccacggcccgctggaacaggtgcagggtatgcgtggcattaagtcgttgctggttggccagcacctgcgcgtactgatctgccaattcgccggcgaaggcgacttcatcggcatgccaggtgcgccggcctcctgagtgttccagacaaagcacgccgatgacttcgccaccgactcgaatggtcgcgtcgagaatggcggtgatgttccgcggtttgaagtagtgctccaccagctcctgggtgcgggggtcctccagcacattggagacgtcgatggcgcgcccgctgtgtacggcttccatgtagcgagggagcgccgagaggtccagcgcggatggatactcggcgctgtcgttgtcgcgccggtacgcggcgatcgcttcgagtcggtccccgttcaggtgccagatggccgcgcgcgcgatgtcataggcctcgctggcggcctgggtaatcagttgcgccgcttcgagctggggattggtggagccgtagcggtgtcgtgccaggcgaacgatcaggttctgttgcgcgcgtgaacggatgaggtgctcgaggtgcacgtcggagaagctctgctggtcatcctcggtcaggtcgagcgtggcagccggcagctccagcggcggcacggcttccgttgagcccggctcgaccacgaggtagccgcgcagcagatcgcgaccgtactgctggctcagctcgccaatctccagcaggttcagcaagccgctggcggcatgcaggcgatagcgtatggaatagtggccctgggtcgccagctgtgcctggacggtgtcgtgcattcgcagccgcacggcgggttccatcaggctggcatagggcgaatcaaccaatgagcacaactggtgagcgggcagaccgaagtgaccctcgcaagcggggtccaggtaaagcagcgcccaactgggctcgttcaaacgctcgaaacgcagcattcccagcctggaaggcactggcaactgcgtcacaacctcggtcgccaaacggctggcggcatcggtatgtattttcatcgagcggttagcttccagtatgctgcggggagtcgtctcgctagccataaaatgcagcgctttcaccggcgaaacgatggctaaataatattaggctacggcaagggtgcatcatgcgacagggactgacaagcctggtttcgaagttactgctgatctcgttgttcctgggtgtcagtgtatcgttgaaggccgctgaaacggccggtctgagctcggccgagccggccaaatacctggctcggctaaaggatctgtatcttacctcgaacgagcgcgaagccctgctggcgcatagcaatgcgctgcttgaaagtcatgcgctgaaggccgcctaccaggttggccaggccaatccacaggacgtaagttatcgcttgagcgtgggtgcgcccggcgagttgcgcattcgtgaagagcggcgtgacgcctctggcaatatcgcggtgcgcaaccgcagcttttcggtgttcggtatggacccttatgtgcgctatcaatgcccgccgcagggcatcgtgtgccttttcgaggacccggcgggtggcgacccatggctgactatcctgcgtgaccctgacggggcggaggcgctggccaaagccttgtcgttcctcctgcgcaatttgcagaaaggctgaaccgtcggcgcgattcgtcgccatgcccatgaaatgaaaaacccgccgattggcgggttttttaggctcatccgatcacagcagcatcgtgcggatatctgccagcagctcggaaagccgcttggtgaagcgtgcagccgccgcaccgttgatgacgcgatggtcataggacagcgacaacggcagcatcaggcgaggctggaaggccttgccgtcccataccggctgcatggtcgccttggaaacgcccagaatcgccacttccggcgcgttgacgatcggcgtgaagccggtaccgccaatgtggccgaggctggagatcgtgaagcaggcgccttgcatggcgtcgggcgacagcttcttcgtccgtgccttctcggcgagctccgcggcctcggctgccaattgcagcaggctcttctggtcgacgttcttgattaccggaaccagcaacccgtctggcgtatccacggcgaagccgatgtgcacgtacttcttgcggatgaccgccttgccgctaggcgccagcgaggcattgaattccggcaattccttgagcagatgcgcacaagccttgagcaacagcggcagcacggtcagcttgacgccggccttctctgccacggccttctgcgaaacgcggaaggcttccagctcggtgatgtccgacgactcgaactgggtcacgtgcggcacgttcagccagctgcgatgcaagttggcagcgcccacctgcatcagtcgcgtcatcggcacttcttcgatttcgccgaacttgctgaaatcgacttccggaaccgctgggatgcccgcaccacccgccgcgcctgaagctggcgcctgcttggctttctgcatcatgttcttgacgtaggcctgcacgtcttccttgaggatgcgtcccttcggtcccgtgccctggacgtcggccagctcgacaccgaactcgcgtgcagtcatgcgtaccgcgggacccgcgtgtaccttgctgccggccttgcttggcccgcttactgcgggagctggcgtggcggccactttggcttcgggcacgccctgtttgttcggtgcgaccgcctgctgctgcggagcggcttcctgcggcttgggcgcggcctttttcgccggcgctgcgcctttgaccttcagggtcaggatcagatcacctgtcttggcctcgtcgccgaccttgatcgacagggattccacgaccccagctttcggcgccggaatctccatgctggccttgtcggattcgagcgtgatcagcgactgatccgcttcgacgctgtcgccggccttgaccatgacttcgatgacgttggcgctgccgctggaaccgatgtccgggatgcgcacctcttcgacggagtcgcccgccgcttcggtgggttcctcggcagcttgctcggtgagctgttcctttggctggctttgcggcgcgctatctgccgttgccggcttgcttgcggccgcgcccttgagaactaggatcaggtcgccagtaccgacttcgtcgcctaccttgaccgaaatgctctcgaccacgccggcggcaggagaggggatctccatgctcgccttgtcggattcgagggtgatcagcggctgttcggcctcgatggtatcgccgacattgaccgagatctcgatcacgctggctttgcccgaggagccgatgtccggaaccttgatttcctgcgactcgccttccgaggctgaggctgaggccgaggcgttctcatcgcctgccggcgtgggcgcttcggcttcgtcggcggggccgccggtcgcggcgcccgcgggctccgcggcggcttgcgccggggcctcgctgctctggccgtcttcgctttccagctccagcagctcgtcaccttccttcagacgatcaccgagcttgaccttcaacgctttcacgacgcccgccttgggcgccgggatttccatgctggccttgtcggactcgagcgtcaggatgctctggtcggcctcgatacggtcgccgaccttgacgaacaactcgataacttcaccctcaccgctgccgatgtcgggtacgcgtatggtttcactcacaataggttctcctgtgcgcacgcagcatcagcaatccagcggattgcgcttctcggggtcgataccgaactcggtgatggcctcggccacaaccttgcgttcgatggcgccgcgatcggcgagtgcctgcagtgcggcgacggcgacccagcggcgatcgacttcgaagaagtcacgcagcttggcgcgcgagtcgcttcggccgaagccgtcggtgcccagcacctggtattcacgcgacggcacccactgacggatctgatcggcgaacagcttcatgtagtcggtcgaggccactaccggcccttcgcggccttccaggcactgctcgacgtagctcttgcgcggttcctcggtcggatgcaggcggttccagcgatccaccgccagaccgtcgcggcgtagttcgttgaagctggtgacgctccagacgtcggcgccgacgcccattttggcgaggatgtccaccgccgcacgtacttcgcgcaggatggtgcccgagcccagcagctgcacccgatgcttgaagtcgcccttggcttcttcgagcaggtacatgcccttgatgatgccgtcctcgacaccctggggcatagctggctgctggtagttctcgttcatcacggtgatgtagtagtagacgctcttctgcagctccatcatctcgtgcatgccgtgatgcatgatcaccgccagctcgtagccgtaagtggggtcgtagctgcggcagttggggatggtgctggccaggatatggctgtgaccgtcctcgtgctgcaggccttcgccgttgagcgtggtgcgcccggaggtgccgcccagcaggaagccacgggtctgcgcatcgcccgccgcccaggccaggtcgccgatgcgctggaaaccgaacatcgaatagaagatgtagaccggcagcattggctggttgtagttgctgtaggcggtaccggccgccatgaaggacgagaaggcgccggcttcgttgaggccttcctgcaggatctggccgtcacgctcttcgcggtagtacatcacctggtcgcggtcgaccggctcgtacagctgccccactggcgagtagatgcccagctggcggaacatgccttccatgccgaaggtgcgcgcctcgtcggcgaggatcggcacgatgcgcttgcccagatctttgtccttgaccagctgcgacaggatccggccgaaggccatggtggtggagatttcacgttcgccagagccgtcgagcacagctttcagggtttccagcggcggcgtcggaatgctgaagctcttcggtcggcgctgcggcagcgagccgccgagcttttcacgacacttgcgcaggtacttcatctccgcgctgtcttcggccggacggtagaacggcagttcttcgagctgagaatcgttgacaggaatgtcgaagcggtcgcggaatttcttcaggctgtcgatatcgacctttttggtgttgtgggcgatgttcttcgcctcaccggcaccggtgccgtaacccttgatggtcttggccaggatgaccgtcggctggcccttgtggttgaccgcctgatggtaggccgcgtagaccttgtacgggtcgtggccgccgcggttgagcttccagacttcctcgtcggacatgctctcgacgcgcttgagcagctccgggtcggcgccgaagaagtgcttgcgcacgtaggcgccgtctttggccttgtagttctggtattcaccatcgatcgctgcgtccatgcggcgctgcatgcggccgtcttcgtcggcagcgaacagcggatcccacaggcggccccagacgaccttgttgacgttccagttggcgcctttgaacacgccttccagttcctggatgattttgccgttaccgcgaaccgggccgtcgaggcgctgcaggttgcagttgatgacgaataccagattgtcgaggttctcacggccggccagcgagatggcgccgagggtttccggctcgtcgcactcgccgtcgccgatgaagcaccagacgcgctgcttgcccttcgggatgaagccgcggttttccaggtacttcatgaagcgtgcctggtagatcgcggtgatcgggccaaggcccatggacacggtcgggaactgccagaagtccggcatcaggtgcgggtgcgggtagctcgacaggcccttgccatcgacttcctggcggaagttgagcatctggtcttcgctcaggcggccttcgaggaaggcgcgggcgtagatgccgggggaggcgtgaccctgatagtagatcaggtcgccgccgtgctcttcggtgggagcctggaagaaatagttgaagccgatgtcgtagagcgtcgcgctggaggcgaaggtggagatatgcccacccaggtccgggtccttcaggttcgcgcgcatcaccatggccagggcattccagcggaccagggagcgaatacggcgctccatgaacaggtcgccgggcatcttggcttcacgggtgacggggatggtgttgcggtacggcgtggtgatgccgtaaggaagtggcgtgccgctgcgggtggccagttcccccatccgggtcatcagatagtgggcgcggtcttcaccttcgcggtcgagtactgactcgagggcgtccagccattcctgggtttcgacgggatcgagatcttgcatggcttgctccagggcggaaaggcttccagaatcggttgcctgcttcgcggtcggctttgtgagccggtgcgtttatgttcttggatgttttggccgggggtagagccgggctctgtagttttactacaaaacaacggctgattcagccccctgcaacattctttcgtagtaaaactacaatcgcggcggctcgctctggtgccttgatatacccgccaccgcctctagctcgggcgctcccgttgtccccgtagccattttttgcgctaaggaaccttatgagtttgccatcgctggttgcattgccgaaatcactccaacctttggtcctccgtgcgcacgagacgttcctcggcgcggagcacgacccggcgctacaggtgcgggaacgattcgcggcgtggccggtggagcgtcgcgaagcgttcgatcgagtgtgcgccgccagtgacttcgtcagcgaacaggttagccgagatccggaaatgttgctccagttggcagagtcagggctgttggagcggccgctgcgagaagccgagatgcgtgcaacgctggccgactcgctcgaggattgcgccgatgaagatgggctggcgcgccggctgcggcgctttcgcaatcgccagcaggtacgattgatctggcgtgacctgacacggcaggcggatctggccgagacctgcggcgatctgtccgacctggcggacgcctgtatcgacctggcctatcactggttgtacggccgccactgcgagcagttcggtgtgccgaccggccggcgcagcggtgatgcgcagcatatggtcatcctcggcatgggcaagctcggtgcgcgcgagctcaatctgtcctccgatatcgatctgatcttcggttacccagagggcggtgaaaccgtcggtaccagacgctcgctggacaatcaggagttcttcgtccgcctcggccagcggctgatcaaggcgctcgatgcgccgactctggatggcttcgtgttccgtgtcgacatgcgtttgcgaccctacggctcgtccggggcgctggtgctgagtttcaatgcgctggagcagtactaccaggatcaggggcgtgactgggagcgctacgccatgatcaaggcgcgcgtggtgggtggcgatcaggtggccggcaaggagctgctggaaatgctgcgacccttcgtctatcgacgctatctggacttttccgcgatcgacgcgctgcgcaccctgaagcagctgatccagcaggaagtgcggcgcaagggcatggcggccaacatcaagctgggcgccggcggtatccgtgaagtggagttcatcgcccaggcgttccagctgattcatggcgggcgcgatctcagcttgcagcagcgccccctgttgaaggtgctggcgacccttgccgggcagggctatctgccggcggcggcggtcgacgagctgcgagaggcctatgagtttctgcgctacacggagcacgcgctgcaggccatcgatgaccgtcagacgcagatgctgccggacaaccaggccgactgcgaccgggtcgccttcatgctggggttcgacgactgggaggcgttccaccgccagctattgcactggcgcggtcgtgtcgaatggcatttcaatcaggtcatcgccgacccggacgaagacgaaaccgagggcgaggccttggtcggcggtgagtggttgccactgtgggagcaggactgggacgaagagttcgcctgtcggcagttgagcgacgccggttttcgcgacgggccggccgcttgtcaacgcctcgccgcgctgcgcagcggcaatcaggtgcggaccatgcagcggctgggccgtgagcggctggacgccttcattccgcggttactggcgcaggtggtcgagcaggatgatccggacttggtgctcgagcgggtgctgccgttggtcgaggccgtcgcccggcgttctgcctatctggtgttgctcacggaaaaccccggggccttgcagcggctcctcgagctctgcgccggcagcccctggattgccgaacagatcgcgcgattcccgttgctgctcgacgagctgctcaacgccggacggctgttcagcccgccacaggcgccggagctggcggccgagctgcgtgagaggctggcgcgcattcccgaagacgatctcgaacagcaaatggaggcgctgcggcatttcaagctggcgcatcggctgcgcgtggcagcctcggaaattgccggaaccttaccgctgatgaaggtcagcgactacctgacctggctggccgaggcgattctcgaacaggtgctggcactggcctggcgttatacggtggcccgtcacggtcagccgaggcgcacggatggttcgctgtgcgatccggcgttcgtcattgtcggctacggcaaggtcggcggcatcgagctcggccatggctcggatctcgatctggtattcatccacgacggcgatcccaatgccgaaaccgatggcgccaaacccatcgacggtgctcagttcttcacgcgcctgggccagcgcatcattcacttgctgaccacccagaccacctccggccaactctacgaggtcgacatgcggctgcgaccgtcgggtgcttccgggctgctagtcagctcgctgagtgctttcgatcgctaccagagccaggaggcctggacctgggagcatcaggcgctggtgcgcgctcgcgtgctggtcggctgcccgcagctgtcggcggacttcgagaaggttcgtgcggcggtgctcgggcgcccgcgcgatctcgaacagttgcgccgcgaggtcagcgagatgcgcgccaagatgcgcgacaacctcggcacccgtacgacgcaggcgggcctggccgagaaggcgttcgaggcggagggcgagttcaatctcaagcaggatgccggtggtatcgtggatatcgaatttatggtgcaatacgcggctttggcgtggtcgcaccagcatccgcaactgctgcgctataccgacaacatccgcattctcgatgggttggagcaggccgggttgatgaccggcgatgaggttcggctgctgcaggatgcctacaaggcataccgcgccgcggcccaccggcaatcactgcagaaactgcccggcgtggtgagtggggatcaatttcatgacgagcgtcgcgcggtgatgcgcatctggcgcgagctgggactcagctgatctcgtctgcaaacagcatttatagaatcttgaggtggcaacaatgtcgatggccgatcgtgatggcgtgatctggtatgacggtgagatggttcagtggcgcgacgcgaccacccatgtgctgactcacaccctgcactacggcatgggcgttttcgaaggcgtgcgtgcctacgacacgccggccggcaccgcgatcttccgcctgcaggcgcacaccgatcgcctgttcgattcggcacacatcatgaacatgaagatgccgtattcgaaggaagaaattaacgaggcgacccgcgccgccgttcgtgagaataatctggaaagcgcctacatccgtccgatggtcttctacggatctgaaggcatgggcctgcgcgccagcggcctgaaagtgcatgtgatcgtcgccgcctggcattggggcgcctacatgggcgacgaagcgctggagaagggcatcaaggtccgcaccagctccttcacccgccaccacgtcaacatcagcatgacccgcgccaagtccaatggcgcctacatcaactcgatgctggccctgcaggaagccatctccggcggcgccgacgaagcgctgatgctggacccggaaggttatgtcgccgagggttcgggcgagaacatcttcatcatcaaggacggcgtgatctacaccccggaagtcaccgcctgcctcaatggcatcacccgcagtaccgtgctgaccctggccgccgagctgggcatcaaggtagtggagaagcgcatcactcgcgacgaggtctacatcgccgacgaagccttcttcaccggcaccgccgctgaagtcacgccgatccgtgaagtcgacggccgcaacatcggcatcggtcgccgcgggccggtcaccgaacgcatccagaccgcttacttcgatctggtctccggcaagaccgacgctcacgccgaatggcggacgttggtgaagtaagaaggcgtcaggctgcaggctacaggcggcaggcaagttgccttgagcctgaagcctgcggcctatagcctgcagcccttatgaatattctgattgtgggtcccagctgggtcggcgacatggtgatggcgcagacgttgttcgtctgcctgaaacagcgccatcccgattgccagatcgacgtgctcgcacccgagtggagtcggccgattctcgagcgcatgcccgaggtgcgccaggccctgagcttcccggtagggcatggcgtactcgatatggcgactcgtcgcagcatcgcgcagagcctgcgcggacaatatcagcaggcgatcctgttgccgaactcgttgaagtcggcactggtgccctttttcgccgggattcccaagcgcaccggctggcgcggcgagatgcgcttcggcctgctcaacgacatgcgcaagctggacaagcagcgctatccgctgatgatcgagcgcttcatggcgctggcctatgagccgggtgtcgagctgcccaagccctacccgaagccgtcgctgcgtattgtcgagcaaacccgcgatgccgcattggcgcgcttcgggctgacgcttgaccgtcctgttttggcgctttgtccgggcgcggagttcggcgaatccaagcgctggccggccgagcatttcgccagggtcgccgagaaaaaggttcgtgaaggctggcaggtctggctgttcggctcgaagaacgatcacggcgtcggtgaagagatcatccagcagctgattcctggcttgcgtgaggaagcggtgaacctggccggcgagaccagcctggccgaggcgatcgatctgctctcctgcgccgatgcggtggtgtcgaacgattccggtttgatgcacgtagccgccgcgctcggccgtccgctgatctcggtctacggatccacatcgccggcctttaccccacccttgtccgagcaggtcgaagtcgtccgtctgggcctcgattgcagtccctgcttcgagcgcacctgccgtttcggccacaacaactgcatgcgcgagctcgagccgcggctggtcatcgaagcgctggaccgcctgattccgcagccggtcgaggtgcgctgagtgagggtgttgctgatcaagacctcttcgctgggcgacgtagtgcatacgctgccggcgctgaccgatgcgcagcgcgcgatacctggcattcagttcgattgggtcgtggaggagggcttcgccgagataccggcttggcaccccgcggtggcccaggtcattcccgtggcgattcgccgttggcgcaagcacccgatgcagacgcttcgctccggcgagtggaagcgcttcaatgcgcggctcggcgaaacgcgctatgacctggtgatcgatgcccagggcttgctgaaaagcgcctggttgacacgctacgtcaaagcaccggtcgccgggctcgaccgggaatcggcgcgcgaaccactggcctcacgcttttacgaccggccctatgcggttccgcgcgagcagcacgcactggagcgggtgcgtcagttgttcgcccaggcgctgggctatccgttacccgagacggtcgcggactatggtctggacaggaaccagctggcggcgccaggcgagcagccctatctgctgtttctgcacggcaccacctggccgagcaaacattggcccgaagcctattggcgagaactggccgagcggatgagcgcgttcggctgggcgatccgcctgccgtggggcaatgccgacgagaaggcgcgcgccgagcgtatcgcgcaggggctggacagcgtatccgtactgccccggttgaatctcggtgggatcgccaaggtcgttgccggggcgcgcgcctgtgtcgcagtggataccggcctcggccatctggctgctgcgctggatgtccccagtatttcgctgtatggccccacttcgccaggcctggtgggggcttatggtcgctcccaggtacacctgtgcgcgagtgggccgaacgccgggaagggggatcgccacaagccctgtttcgacgatctgctgcccgagcgcgtcgccaacgaactcaaggccctgttgcggtccgcggaggcgtcatcctgatgcagcttgcgttcatcctctacaagtatttccccttcggtgggctgcagcgcgacttcatgcgcatcgccctggagtgtcagcagcgcggccatgccatccgggtctacacgatgatctgggagggcgaggtgcccgagggtttcgaggtgctgatcgcgccggtcaaagccctgttcaaccacacacgcaacgaacgcttcaccgcgtgggtcgaggccgacctggccaagcggcccgtggcgcgagtggtcggcttcaacaagatgcccgggctcgacgtctattacgcggccgatccctgcttcgaggacaaggcgcagacgctgcgcaacccgatttaccgccgctggggacgctacaagcattttgccgagtacgagcgggcggtgttcgacccccgctcccggaccgagatcctgatgatttccgaggtccagcagccgctgttcatcaagcactacgccaccccggccgaacgcttccatctgctaccgccgggcatcgctctggatcgccgcgcgccggatgacgcggcggagatccgccaggcctttcgcgatgaattcgatctggggagcgacgagctgctgctggtacagatcggttcgggtttcaagaccaagggactcgaccgcagtctcaaggcgctggcgtcgctcccgcgtgagctgaaacgacgcacacggttgttcgtcatcggccaggacgatccgaaacccttccagctgcaggccaagacgctgggcatctccggtcaggtcgagtttctcaaggggcgcagcgacatcccgcgcttcctgctcggggcggacctgctgattcatccggcctacaacgagaacaccggtaccgtcctgctggaagcactggtcgccggtctgccggtggtggtgacggatgtctgcggttacgcccattacattgccgacgccgattgcgggcgcgtgattcccagccccttcgagcaaggccggctcgaccgcacgctggccgaaatgctggccgacgacgtgcagcgcagtcgctgggcacacaatgcgctggcctacgccgatagcgcggacctctacagcatgccccagcgggcagctgatgtgattctggcggagcgaccatgagcttgatccttggcgagcccttccagacgctctgggcgggccgcgacccattcgatgcggtcgagcagcttcaaggccaggtctatcgcgaactcgacggccggcgcacattgcgtaccgaagtccaggggcgtgggtacttcgtcaagatccaccgtggcattggctggggcgaaatcgtcaagaatcttgcgaccgccaagctgccggtgctcggtgccgggcaggagtggcgcgccatccagcgcctgcaccaggtgggcgtgccgacgatgacggcggtggcctacggtgcgcgcggcagcaatcccgcggcccagcattcgttcatcatcaccgaggaattggcgccgacgatcagcctcgaagactacagcctcgactggctgcagaatccgcccgacccggtgctcaagcgtgcgctgatcgccgaggtcgcgcgcatgaccggcaccatgcaccgcgccggcgtgaatcatcgcgactgttacatctgccattttctgctgcataccgataaaccggtgacagcgggcgattttcgcctgtcgctgatcgacctgcatcgcgcccaggttcgccgccagacgcctcgccgttggcgcgacaaggatctggcaggcctgtatttctcggcgctgggcatcggcctgacccggcgtgacgagctgcggtttctcgtcggttattttcagcgaccgctgcgccagattctgcgtgatgaggcggcgctgctgtcacgcctggaacgcaaagctgaacagttgcaaagtcgattccggcgcaagtacgcagctggggttcagcaatgagcgaatggaaaatcgtcggagcgttaaatgccgacgtcgctggtgcgtttgccaacctggatgccgttttcgcactggaaggcgagcggatcgccagagacccactatccgaggtcatccgggtcagcattgccggcgaacgcttttacgtgaagcgctattgggctgccggcaagggcttacggcgtttcatcgggcggccgagagtcgaagctgagtggcagaatctgcagcatttcagcgactggggagttgccgttgcgccactggtcgcctggggtttgcagcgacgagcaggtttgtttcagcgtggggcactgatcacggcggaagtacctggcaccatggatatggctgccatggcgtgctccggcgatccgaggctagcggaccggcagtgggtttaccgcgttagtgaacaggtagccagcgcaacgcgcgccttgcacgaacatcactttgcccacaacgatttgaaatggcgcaacttgctggtcaatgaagcgggtgagttatttctgatcgattgtccttcgggggatttttggtggggcccgcttcttaatcatcggatcgtaaaggacctggcttgtctggacaaagtggcgaggtatacgttgtcgcgtactcagcgactgcgtttcttcctgctctaccgtcagcagcagcggatgggtcctgacgacaaagcactgatcagaagaatactgacctatttcgaggggcgcgaatgatggatttcatttcgccggtggatgccggtgcccttcgtggtgcgggtctggatagcttcgatgccctgtgggctctggagctcgacaccgttgatgcacccaatactgcccacgaagggtggagcagtgtgtcccgactggatatcggtggtgttggatattttctcaagcggcagagtaattatttgtcacgcagcttgcgtcacccgcttggagagccgacttttgcggcggaattccgcaatatctgccgctatcagcgcaagcgagtgccgacgctcagagcagcgttttttgcccaacgtcgtattcaaaacgcctttcgtgccgttctgttgacccgtgcgctggatgactggcaggacctgagtggcttgcttgaccaatgggagaaccttggaaaggttcagcaacgggcagctcttgttgcgtgcgggcacctggcccggcaactgcacgaagcccatgagacgcacggctgcttctatccaaagcacatttttcttcgggagagccccggcggctacgaggcgtgtctgatcgacttggagaagacacgcatgttgttcagtcagaggggccgagtgcgcgatctcgaggcgttgatccgacgcgttggtttctggaacgaggatgagttgcgctgtctgttggcggcttatctgggcgaggaggatggtaacagtcgtgcgattaacgtctggttgaggcgtgttcagacgcgtcgccaacacaaggaagcgcaggcatgaagcttggggaactacacctggccggacgaaatccagcgctacccctgagtgtcgcgctgggcgccgacgagttgcagatagcgcaatggctacgcgtactgccagggcagcgctatgtggcgaaggcgcaatggcgggggcgcacggtgttggccaagctgatggtgggagaccgtgcgcgccgccatttcgagcgtgaacgccatggcgcgaaactgctcgtcgaacatcaactgaccacccccgtattgctggagcagggatttgaagagggagcgggtggttggctgctgttcgagttcctggagggcgcgcgtagcctgcatgatgcttggctagaggtgtctcggcagctgccgttgagtgacgatcaacagtcggtgctgggcagtgcgctggcggagattgcccgcttgcacgaaaaagggctctggcagagtgatctgcatttggacaacctgatgcgccacgatgggcggctgtacctgatcgatggcggcggcgttcgcgccgaagtgcccggccagccgttgtctcggggcctcgttctggaaaacctggcgctttttttcgctcagttgccggcagtattggagccatttatcgaagagttggtggtgagctatctcctgatcaacagcacgcacgcgcttccgctcgaagcattgctcgacaaggtgcatgcggcgcgacgacagcggctcagcgactatctgaagaaggtcggccgtgattgcacagcgttcagcgtgcgtcgcgatggtaatggcctagtggccgtgcgccgcgagcgtgaggcgcagttgaaaacggtgttggacgccccggatgactacgtcgccggagggatggcgctcaaaaaaggcgggagcgcaacggttgcgcgggtcgatgtgcaaggcgaagcgcttgtaatcaagcgctacaacatcaagaacctggcccattggctgaggcgcttctggcgcccgtcccgagcttggcatagctgggtcgaagcacaccgcctggatatactgggcatcgttacaccccagccgctagccgtgatcgagacgcgtcgtctggggatgcgcgggcgcagttatctgattaccgagtatgtaagtgggcaggatataatcgcgcgcttcgagccttacgtggacaccacacctccggaacgcgagctgctggcattggaactacttttcgctgccctgattcgcgagcgtatcagccatggcgacctcaaaggcaccaacctgctctggcgagacggtagctgggccttgatcgatctggatgcgctgcatcagcatcgtagcgtggctcggttccgtcaggcttttgccaaggatcgtgagcgtttgctacgcaactggccggccgatagcgttttgtaccgtctgctggatcgacgtttaccgaagacggtttgaagcaggatgcttgaggctgaaaagaatgcccacgggctgtgtattacaacgcggggcttcaagcttaaggcttttggctccaagctgatttcaagaggctttttacagtggcattgacgattctcggcctttccggcgccctcagtcacgatccttctgcggcgctgtacatcgacggcaagttgatcgccgcagcggaggaagagcgattcgtgcgcgacaagcacgccaagaatcgcatgccctatgaatcggccaagttctgcctggagcaggcgggcatcaagccgtccgacgtcgatgtcgtagcgattccttttgcccccatcagcctattcgagaaagcacggtggcactacgccaagcgttattggtacgcaccggatcgcgcgctggatgccattctcttcggtaatcgtcgctataagcgctaccacaagcgtatccagtggtgtttgcaacagctgggcttcgatctgaagaaaatcaagatcgagccggtagagcatcatctggcgcacgcatcgagcgcctatcactgttcgggctttacggaaaaaaccgccatccttggtatcgatggcaaaggtgagtacgcaactacgttctttggctatggcgagaacggccggatccacaagatcaaggaattctacgatccggattcgctgggcggcctttatggtgctatcaccgaattcctcggcttcgaaatgctcgacggcgaattcaaggtcatgggcatggcgccatacggcgacgcgacccaatatgatttttcccgcctagccaagtttgagaacggcgagctgaccgtcaacaccgattacgccaacgtcatcggctttcgccgttacaaggagaagggcaagggttactacttctcgcccaagctgatcgagtggctagggccgaagcgcgaaggcgatattgccgacgatccttacattcattatgccgccagcatgcaagcgctgttcgagaagctggcgctgcagatgatggattactacctgggcgacatcatccgtgagaccggcaagatcgccttcgccggcggttgcgcgctcaacgtcaaactgaatcagaaaatcatcgcgcgccccgaagtgaaggagctgttcgtccagcctgcatctggagacgccggtacagcagtcggtgcggcggcttacatctcgcatcagcgtggcgtgccggtggaaaagatggagcacgtatatctcgggccgtcctattcgaacgaagacatcatcgcagcgtgcgcacgtcatccgaacaagccgacctggacgcagatcgagaatatgccgcagcgcatcgcgcagatcatggtcgagggcaatccggtcgcttggtttcagggcaggatggagttcggcccgcgtgcgctggggggacgctccatcatcggctgcccgagcgttccaggcgtggcgaatcgcatcaacgaacagatcaagttccgcgaacgctggagacccttctgcccatcgatgctcgacaccgtcgcgccgcagatgctcaaggtcgaccatccgagcccattcatgacattcactttcgaggtcaacgagggctggaaggagcgcgtcggtgaagtagtgcacgaggacggcacctcgcgtgctcaggtcctggagcgccgccataacccgcgctggtatgacctgatgctggagttggagaaactcaccggcaacggcgtctcgctgaatacctcgctgaaccgccgtggagagccgatgatctgctcaccgaccgatgcgttgaacatgttctatggatcggatctgcagtatctgatcatggaagatgtgttggtggtgaaggatggaggtcgtggggatggcagtgtctgagccattgataagcgtcgttatccctgcgtataactatgctgcaactctccgacgtgcagttgattcggtgctggttcagctagatgaagcctccgctgaactaatcgtaatcgacgatggttcgaacgatggcacgccgcgtgtaatcgaagcgttactagccgcccatccggcgagcttcagagctttgcgcaaggaaaatggcggattggcgtcagtacgcaatcgaggcattcgcgaagcccggggaagctatctaatctttcttgatgcagatgacgaaatggcgtcgggcgcgcttgcattaatcgctcggcacatcaccggacatcctgaaactcgcatgataattggcgggcactacgccatctcaaacaacggcaagcggcgtgagcatctgcccccgaaccttcctgaaacaccgctggagcgggtgcgcggctatttgctggacaagcgtttcgcgttatccaatggcgcttgcgcaatgcaccgggaggtgttctcgcgtgctggttaccccgagcagtttcgcagcgccgaggacatccctgtcttcagtcaaacgctggcgaattatccatgtacggtgttggctgcgccgttggctttgatccacaagcacgatgacagtcttcgacatcaattcagtcacgccaaggccggaggtcttgctttggttgacgaggttttttcgccgcggcgcttgggagaagaatttcaagtgttgaaggatgaatttttggttcagcgctgcttgtcgttgtttcgcagtgcttatctcgcaggtgatgttggcgccgcaaaagaatacttccataaagcctcgcgccatgactggagggtgatattcaactggtcctacacgcgcaaatacctgcgtatgcttcggagcgcttgaggtgcgggtgctggtgctcaccagtgccgatcgtgcgctggacaatcgcaacctgtggtcgtcgctagggatgcatgcaggcgttgagatacgctttctcgataagggtcagcagcggcgactgaagacttacttctctacgcaggacctcagtggctatgagcgcattgtcttagaccttatgttcaagcacatttggactcagagccggtttctgcgcagtctgccttcgctgactctttatgaggaagatgcttatctggacttcatgcctggatccaggtggcgtggggcgttcgtgagcttctaccggcggctgcctggggtgcgagtaataagtacgggctttgccgtcacgcggtatttgcgcgccgctggggttgatgcgcacttcgttccaaaaggattcgatcctgctcgcatgcttgtacagggctgcgagcgtgatattgagttaggtttcattggccggcttggcagtcgggcctacacagcgcgtcgagcgctgctcgaagctctcgcggcggtcgagccactgcaaatcatgcgtactcactcgcctgaggaatacgttcaaactctcaaccgaatctggattttcgtgagtgcagacgttgggcttagcgaatacatggctaagaacttcgaatcgatggcctgtggttgcttgctcctcgccaagcgtcagggcgacggtgaggaggaggcgttaggcttgcaagatggcgtccatttgttgctctacgacgatctcgattcgttgcgctcgcgcctcgcttgggcgcgtgaaaaccccgatcttgctgacgccgtcgcgctgcgggggcgcgagcatgtcctcgcaaataatgcctatgagaaactggccgacaaagtagctgcggtggtatccgcgcctttcgctactgtgccttcgcagccttggtggaaattttggtaagcacagttccctacccaaaagtcagcgtcatcattgcctcctataaccatgcgcgctacatcgaagcctcaattcgcagcgtgatggctcaaacctatccagatattgagcttttggtagtggacgatggctccagtgacgacagcgttgcggttatagagcgtttgcagcgcgagttcgacttcgattttaaggtccagggcaaccaagggttgtctcgcacgctcaatgctgcgattgcgcgtagctccggtgaatatgttgcgccgttcggatctgacgacatcatgctgcccaataggatcgcattgcaggtcgaatacatgcggggaaagcccgaggtcggcatctgtgcgggatcggtaactagtattggcccggatggcgagccgctcggtaatgataaaccaccttactggcggcggctggacttcgatgatatattcctcaatcgcaagcccggctcccccgcggcaacgttattgttccgtcgcgaggcgctggacgcggtgggtggtttcgatccgcatatccgtctcgaagacttggttattgaactcaagataacccatgcaggttggtttattgatgtgctcggcgaaacgcttgcgttttatcgggtccacgcaagtaatacctacaagaactatccgttcatggtcgagaatgtgctgatgaccttttcgcgcttcagtgaccatccggcctatgagcaggtctgtgccaactatcgcaactcgatgtttctcaaatgcgcacgccgggacaaagtacttgcgcgcaaattgctccgtgagctgccgttgcgtgcatgggacggaaaaactatcaaggggctctatcgcctgctattgccttctaggtcccgtgaccgagcataagcaaggaatgcggtgatgtcctcgctgcataacaacgaaacagccgctcgtatttcctcctcgggccagttccaccaggcaatctccagaagtgcactgcgagtgttttcagcgaaacgccatcggacaatctctgcggggttgccggcgacaactgcgtagggctcgacgtcgcggctgactaccgcgccgttcgcaacaaccgctccgtggccaatgttcacacccgaaagaatgacgcagtttgcgcataaccacacatcgcttccgatctccacatcgccgcgcgtaccgccatatccttgaatatggcttgcttccggtaggtatgccggaaacgggtaggttgatacccagtcggtacgatgatggccgcccaagaaaatctgaacgttgtcggcaattgagcaatagttgccgatgcgcagagtgcttccttcctgccaatcgtgaaccttaggcatgccgtagctacctaagccaatttcatagcggggataacgctctcgaaaccgcgcttgaggacgcaagaagcgagggagttcagggcggcccagccagccccgcaagcttttgcgcagttgccgttccagtcgcttaagtggactcatgtgtaggttccgatataagccaggcattgatcagcagggcgaaagggatccagagcaggaaccagtgttctttgggacggggtaagaagtctctaccttccgtcaggccggcgacgaatccgaacaccaacagcgcggaggcgattagcacagccgagttgtgtcgattacgccagctataaatggctgcgattccgtacagcgccagccacaagatcagacctatcaaaccaccagccagcaacactgcgagctctatattgtgaggatcgttgaaggctagtccgctgccttgcagcttaagcagcagctgatggtcataaccgaggccaaaccacggctgttgggtcgccagcgcccaagcttcggcccagatgtcaggacgatgggagagtccacgcgccatcagggcggcaggatggaacagcagcagcgcgagccctatgcaggcagtcgccagtacgagtagcaatccgcgacgactaagctgacccaagcacaaccaagtcgctgttgctgccagtgcgagcagaggcgttcttgatcccgttgcgataatcacgctacctagtatcactaggcaggccaatggaagcggggccaggggcttgtgtgccgagaaccagtaggccaaccagaacgctgcaaaaaagccaaacacgtgggcgctcaggagtgggttgtaaagtgctccataaccatggaaacgttggccgcccagcggggcgtgtccactataaatgaaatagccgtaggaaaggccggacgcgactgttgcgatgacggcggagaccttcagtacctgcccgagcgcctgcggactttccactgccagtatggctgcgctgaatagcagtaccaaaacgtaaattgggcgtttgattagcgagaatgcggctgtgtcgctatcggaccagatcagcgtcaaactcatatagctgccaaataggaggaaggcgacaattagcggatgcccgatcaggcgccgggttaaacgcggctgcataaccatggcaaataaagcgggagcggctagcagtgcgtaatacagcttatggaagagtgcgcgatcacctatccaaaaaagacccgtcaacaacgccagccagccaacgggtaatacgtagcgacttatccagcgcgagggggcggtgcctcggctttttttttctttatcagttatctcgggtggcaagagtatggtcatccatgaagccgggttctagggaaagctgaatcaactcattgagagacaaaacggactctgctgttcgtgtataaccgtcaaagaagctacggtcgctgtcgccgagcagccacttacggtcgttgggatagcgcaacatatgacgaaaattacgcagtcttttccgcttgctgagcgaccgttttcctacgctcaggtctgcaatgtcaatcaatcccaaccctccatcggtgtcgatcactacgtttcccaggtgcagcgaacgaaagaaaataccttgcttatgcaggtctgcgacaaaagcgccgaagcggtagcgtagggcctgtttttcgacctcatcatttacttggcgcagcgtccgtccttcaagcggtgcatagtgcacaacgtctcggcgcagagagggtaccctatatacccccagtatcgtggggcacgcgatgccgcgatcttgcaaagcgaccgcattgtcggcgaagcgttctgcatagggatagagaacggctgaggatagcaggcgcttgcgccggaacagctttaggtagcttccgtcatcaaggagcaacaccttttccccgtgtccgtcggactcgattgtttcggcattacctcgcagcgattcgaactcatcgagggagagggagatcatgcgcaggcggcaccaagctgtttttcggttgcgcagtttaccccaagagaccgttctgttttcgttctgagtaatcaatcgggggcgccccgctcgggggcgtagggcttgcggggcgtggtagaatcgtcagtctctttctagggtaagccttcgctgatgagcaaatttgtcgaaactgcagctcagccttcatccagtctgaagatctactttcggttgctggggtacgtgaaaccctacatcgggtattttgcgctgagtattttgggctacgtaatttttgcatcctcacagccgatgcttgctggaattctcaaatacttcgttgatggcctgtccagcccagatgcagtgctatttccgaatgtggcctatttgcgggacttgcagcttctgcagattgtgccgctgctgatcgtccttattgccgtttggcaaggagtcggctcgtttcttggaaacttctatctcgccaaggtttcgcttgggctggtgcatgacctacggctttcattgttcgacagcttgctcaagctgcctaatcgctatttcgacagccacaattccgggcacctgatttctcggatcaccttcaatgtcaccatggttaccggtgctgccactgatgcgatcaaagtggtgatccgcgaagggctgacggtcgtgtttctgttcgcctacctgctatggatgaactggcaattgactttggtaatgctggccatcttgccaatcatcgccttgatggtcagcagtgccagcaagaagtttcgcaagcagagcaccaagattcaggtagcgatgggcgacgttacccatgtcgcgtcagaaactatccagggctaccgggtggtgcgcagcttcggcggggaagcgtacgaatctgagcgtttcgctgttgccagtcgagacaatacccacaagcaactgcggatgatcaagaccggggcggtatatacgccaatgctgcaattggtaatctacgttgcgatggccgtgttgctttttctcgtgttgtacctgcggggtgaggcgacggcgggagacatggttgcctatatcactgcggcagggttgttgccgaagccgattcggcagttgtcagaggtcagctccacaatccagaaaggcgtagcgggggcggagagcattttcgagcaattggacgagccgtctgaggtcgatcagggaacagtagcgtatgatcgggtgagcggccgcctcgaagtcagcaagctcagtttcagttaccccggcgcgcaaaagcaagtgctcaccgatatctcttttagcgccagccccggtcagatggttgcgttggtcggtcgttcaggtagtggcaaatcgactctcgcgaatctaatccctcgcttttaccatcacgaaactggtcacattctgctcgacgacgtagatgtcgaagactacgagctacgcaatctgcgtaagcatattgcgctcgttacgcagcaagtcacgctgttcaacgatagcgtggccaacaatatcgcttatggcgatcttgctggtgcgcctcgggaggcaatcgagcgcgccgtagcggcagcctatgccaaagagtttatcgatcaattgcctgaggggctcgatacccaggttggtgaaaacggcgtcttgctgtccggcggccaacgccagcgcctagctattgcccgggcgttgctcaaggatgctccggtattggtgctcgacgaagccacctcagcgttggataccgaatcagaacggcatattcaggccgctctcgatcaggtcatgaaagggcgcacgaccttggtaattgcgcaccggctttcgactatcgaaaaggccgatctgattttagtaatggatcagggacgcatcgtcgagcgcggcacccatcagaagctgcttgcgatgaacggttactacgccaggctgcatgcattggggctggatgaccacgccgccgctgataacacatgatcattttttgcgactttctgctgcggagcccctatgaagctgtccatgccccgtttcgaccaagcctccgtactggtggttggcgatgtcatgctcgatcgttactggcatggcggtacctcgcggatttcgccggaggcaccggtgccggtggtccgggtcgatcaggtcgaagaccggccgggtggcgcggccaacgtagcgctgaacatcgcggcattgggtgcgccagcgatgctggtaggcgtaacgggcgtcgacgaagcgcggcaaagcctgaccgatagcctggcggccgcgggggttggggcgtatttccagtccatcgaacatcagccgacgatcatcaaattgcgggtcatgagccgtcatcagcagctgctgcggatggatttcgaggaacccttcgaaaccgatcccgcagcgctgctggcgcaggtcgaagagctgctggacggcatcaaggtgctgatcctctcggactacggcaagggggcgctgcgcaaccatcaggcgctgattcgggccgcacgccagcgcggcatcccggtcctggccgaccccaagggcaaggatttcgagatttatcgaggcgcgtcgttgattacgccgaacctcggcgaattcgaggccatcgttggccattgcgctgacgaagccgagctggtgaccaagggggccgagctgatgcgcagcctcgaactcggggcgttgctggtcacccgtggggagcatggcatgacgttgctgcgtccggaccattcgccgctgcacttgccagcgcgggcgcgcgaggtcttcgatgtcaccggtgccggcgatacggtcatctcgaccctcgccgcggctatggcggcaggtgaagagctgccacaggcggtggcattggccaatctcgctgccggcattgtcgtcggcaagctgggcaccgcgtgcatcagcgcgcccgagttgcgtcgcgccgtgcagcgcgaggagggctccgagcgcggcgtgatgacggtcgagcagttgctgacggcagtcgaggatgcacgcgccgagggcgagagaatcgttttcaccaatggttgtttcgacatcctccatgccggtcacgtgacctatctggagcaggcccgcgcgcagggtgatcgtctgatcgtcgcggtcaacgacgacgcttcggtgagccgtttgaaggggcctggtcggccgatcaattcggtggatcggcgcatggccgtgctggccggcctcggtgcggtggactgggtcgtttgcttccccgaggacacgccggaaaatctgctggcgcaggtcaagccggacatcctggtcaagggtggcgattatggtgtcgatcaggtcgtgggcgccgatctggtgacggcctacggtggcatcgtgaaggtgctggggttggtggagaacagctccaccaccgccatcgtcgagaagatccgcagccgctgagcccggccactccaggccggctcgggtcggccgctagcggcccgcggcagcgctggtcgtgccgatccagtcgcgccagcgtatgcgctcgtcgcgcaccacccactcgtgctgcggtgcaaaactctccgacagccacagcccgcgggtactggccggcaccggcaggcccttgcgcagggtcagtagcgaggcggtaggccgcccgtgctgcaacggtatcaggtaaaggtcgggacggctgcggtccagttgggccaccagcttgccgtcctcgaggcgctcgtcgacatggaacaggctcagttcacgggtctctttcggcagttccaggcgcatgtcgtagaccagttgcagcgatgcggtaggcaggtgcacgtaagccctgggccgctccatgagggtcatttgcccgcattggaccgggcgggccgagccggacagcgacgccaggttgaaatgcaccgcttcgcggtagcgcaggctgccctgatagggtgccggtagccagatgtcgccgaagcgccccgcgagccagccctccggggtttccagcaggcattcttcggcgacctcctgaatggctgtcagcagcggcaggctgagttcgtgcgccggtacatagccggagatcagcttcaacacgacgtcgcctcgatccagacgctgctgacgcaccagcacccagtattcctggccctgccagctgagcgtcaggcgcaccgagacaccgagattggcgagttcgaggcggaaggacgaaggatcgtctacatccacagggcgtcgacgttcgagcacctcggcgaaattcagcggacggcccaggctctgataacgcaagccctccgtgctggcctcgacgagcactggcagggtcttgaacgcggtgggattcttgcggatcaatacgcgcggcattcggctcctcctggggtcggtcggccgtagggccgtcgttattgttgttgggacaaaacggctgcagcggtatgcacgttatctgacaggtgttgcgggttgatggtgccgacaatggccgcgccgaccccaggatgcgcgaacaacaactctaagctggcccgtaccgggtctgcgcctggcgtcaggcaggcatggccgctggccagtgcctttttgatcaggatgcccttcgcgtggcttgccgcgtagtcgagcacaggacgttcggcttgctcaccgaggttgtaggtcaccatggcgcagtcgccttgttcgagcgcaagcaggccgccttcgaccgtcttgccggacagcccgtagccaaggatcttgccctcgtgcttgagctcggcaagcgtctcgtagacgccgctgttgcgcagtatttccacgtcacgcccatccgagtgcaccagcaccagttcgattctgtccgtctgcaggcgccggaggctgcgctccaccgagaggcgcgtgtgcgccggcgagaaatcgaaatgcgattggccgtcgacgaactcctcgccgaccttgctgacgaccacccagtgctcccgctggccttgaagcaaaggtcccaggcgctgttcactgatgccataagcgggcgccgtgtcgatcaggttgatgcccaggtcgcgcgccaggcggagcagttggcgggcctgcgcatcgtcagggatgcggaaaccgttggggtacttcacgccctgatcacgacccagcttgacggtacccagccccaacggcgagacggtgagccccgtactgcccagtagcctgtgaaagtcgtgcagggtatcgctcatgccaacagcccctgccagaaaggcccactaatggctgggtgcggtagctccggcagtgcggggtgcggctgagggcgaatgccatcgcggaccagcgcggcctgcacgcggtcagcgaaatcgggcgacagcgccagcttggtcggccagccaaccagtagccggccctggtctgcgaggaaggcgttgtctggcctggccagcgccgactgggccggctcggcgcgatcgatgcgcagggtggcccattgggccgaggtcaggtcgatccagggcaccagttcggccagctccttctttgccgcggcaatctgcgccgcttcgtcgcgtgcgaccccctcggcctcggccaggtcgccacccaggtaccagagccattgaccatcggcggtcggatggctggtcacggtaatccgaggcttcgagccaccgcccaggcagtgtgcgtaaagcggcttcagcgtggcggccttgaccagcaccatgtgcagtgggcgtttctgcatcgccggctgcgccagccccagcgcgtccagcagctcggcattgccggcaccggcggtaagaacgatgcgctgggcgcggattgcgcgaccgtcgacgagcagtccggtcagctcgttgtgctctctgagcggctcgatccgttcggctttcagcaggcccgggccggccagctccgccagccgtcgaatcaggctgggcacatccagcaccagctcgctgaggcgatagaccttgcccttgaatcttggatgctgcagcgccggcggcaactcgttgcccttgacctgatcgactcgggagcgcaccgccttgctggcgaaaaagctggtgaggttgccggtcaacgtgccgggcgaccagagatagtgcgcatcggagagcaaatgcaccccggaaaggtccagttcgccgtggccttgcagcgcttcgcgccagcgccgtggcatgtcggcgatggcttcggaggcgccggtcaatgcgccgcccagggcgtatttggtgccgccgtggatgatgccctgcgacttgacgctctgcccgccacccagcgcgcccttgtccaccaccagggtcgaatagccttgctgacgcaggcgcgcggtcagccacaggccggcgacgccaccgcctacgatcaggatgtcggtgctcagggaatcggacatggtcggcctcgctgtgaaatcaggcgagcagtataaccgcttgcccgtcggctttaattgacgcccggtggcagcctcagtggcccgtgctgctggaaaacagctggatcaccaccacgcccgcgacgatcaggaccatgccgagcacggccggcaggtcgagcttctgctgatagatcgccgcggccgcgacgctcacaagcacgatgccgaggcctgcccagatggcataggcgatgcccaccgggatggtcttgactaccaggctgagcatccagaaggacaggctgtagccagcgacgaccagcaacagcggcagcggccggctgaagccgtcgagggctttcatcgaggtcgttgcgatcacctcggccgtaattgcgatagcgagatacagatagccagtcatacgccctccggtacaagcagggcgatcgattcgcgctgcgcttcattcggctgcgcctgtgcacgcaagttcggcttgctggtgcgttttcggtgtggaccccgtggtggccgtttcatcgaggcctttgctaagctccgcgcccatgaatcgtaccctttacaccgtgctgttccatctcgccttgcccctcgtggtgattcgactgttctggcgtgcccgtcgagcaccggcctatgcaaaacgcatcggtgaacgttttgccgttggcatgccggtattccaacccggcggtatctgggttcatgcggtctcggtcggcgagagcattgccgccgcgccgatggtgcgtgcgttgcaggcacgttacccgcagttgccgattaccatcacctgcatgacgccaaccggctccgaacgtattagggccttgttcggcgacagcgtgcagcactgctatctgccctacgatctgccatgcgcggcggcacgttttctcgatcgactgcagccgaagctggccgtggtgatggaaaccgagctctggcccaaccacatccatcaatgtgcgcgtcgcggcattccggtggtactggccaatgcgcggctgtcggagcgatcggcgcgcggctatgcgcgcttctcgcggctgaccgcaccgatgttgaccgagttgagtctgatcgccgcacagaccgaggccgaagccgagcgtttccggcagcttggcgcgcgcgacagtgcagtcagggtaaccggttcgatcaaattcgatctgagcgtcgacccctcgctgctcgggcgtgccgaacagcttcgtcgacaatggggtgcaacggagcggccgatatggatcggcgccagcacccacaccggcgaagacgaaatcctgctggctgcgcatcgccagttgctggcggagcgacctgacgccctgctgatcctggtgccgcgccatccggagcgctttggttcggttcacgaactctgtcgcaagcaaggtttcaccacggttcggcgctcgcttggcgagccgccccaggcgccgacgcaagtggtgctcggcgacaccatgggcgaactgctgtttctcttcgcgctagccgatgtggcgttcgtgggcggcagcctggtgccgaccgggggccataacctgctcgagcccgcagccctgggcaagccggtgctgaccggcccgcatctgttcaactttctcgatattgcagcgcaactgcgcgaagccggagcgctcgttgagctcgacagcgctcccgagctggcggtggccgtcatggagttttggcgcgacgctgccaaggcggagcaggcgaggcgtgcaggctaccgcgtgctaaagaacaatcagggcgcgctgggacgcctgctggcggagctggaacgtctactggaacgacgttagctctccgcccgagacgcaggccgctcgatgatggcggccgcgactgtcaagcgatgcggatgacgcacctgaaggtgcgtgactgcgcgaacggccaagtgtctggcctgattactcgacccgcaccggtcggccaaaattctccgacaggtccggcggcagaaagtcgctgtccgggtcgtagtccgccttcagatagcgttgcagatcttcgaggtcgcccggattgagcgtgccagcggcttgcttcaaacgcaggttgtcgaggatgtagtcgtagcgcgcgttgttgtagtcacgcactgcggcgaacagccggcgttgggcgtcgagcacgtcgacgatattgcgcgtgcccacttggtaaccgatgtcggtggcttccagtgcgctctggttggacacaatcgactgccggcgcgcctgcacctgctcgacatcggtattgaccgcgcgatgcaggttgcgggtggactcgaccacctgacggcgcaggctttcgcgctgctgctcggtctgggtcagctggtagaaggcttcgcggctctgggaggtcgtcagcccgccgctatacaaggggatgttcagctgcaggccaatgctgctctgctcgacatcgccgttgtagcgcggcagatcgaaccccgggatgtccatggcgccggtattggaaaagcccaggctgtcgttgtcgcccttgctgtagcgcgcgactgcgtcgactgtcggcgcgtggccggcacgacgctggcgcaatgtttcctcggcggcggcgactgcctggtcgaccgcttgcagattaagattctgctgcgctgcggtgttaacccaggcgcttgcatcgttcggcacgggcggcagcacgggcaggctgtgctcgataccttccagggccagatattcacgattggtcagcgtgaacagggcctggaaggcgtcgtcgacctggcgcttcgcgatcatgcggttggcgcgagccgtatcgaaaccggcttgagcctcaagtacatcggtgcgatcggacaggcctacatcgaaacgttcatcggcctgatcgagctgccgcttgaaggctgactcctcggccttggcggcggccaggttgtcttgcgcgcgcagcacggcgaaataggcctgtgccgtctggcggatcagatcctgctcggcgatggaatactccagcgccgcctgctcgctgatggcttcggccgcctgcagctggaaccagcgatcggcacgaaagatcggttggctcagcgtcgcctgatagaccgtgccgctacgtgacagcgatcgcgacccagcgctggtgtcgacatcggtacgggtttggctggtctcggctcccgcgctcagattgggcagcaatccggcgcgggcctggggcacgatctcctgagtcgcctggtactgggccctggcggctgcgaggtcggcgttattttccactgcctgtcggtagacgctgatcaggtcggtgcggctggaaagcgagggtgcggtatcggcccatgccagccccgacgaggcggccgtcacagcgagtgccagcgtgagtctgcgcagcatgtgcgtctttccttgaagcgaagtgatgggcaaggctatgcgccgccaggcgagcggtcaaggtgcttggcggcgccttgaagtggccgggtggcagatcgcaaacgtgacccggcggtcgcgtgtctccggctcggcgtggctttccgccgaacacttgattacactcgatcccgttcttgtcggggtgccttgaatcgaaggctgagatcggaaagttccggatcccgttgaacctgatcaggttaaggcctgcgtagggaacaagatgtgctcgccagtcgtcccggcaagctctctcggcgccagtcccggcgcgccccgatgtccttttcccgccgtgtttttcaggttcgctccgacaactatcgaggagccagccagatgcgtgcagaacaacaaaatctcagtgaatcggcccaggtcgaccagcagtcgatccagcctttcccacgttcgcagaaaatctacgtgcagggttctcgccctgacatccgcgtgccgatgcgcgagatcagtctcgacgtcaccccgaccgacttcggtggcgaaatcaacgcgccggtactggtgtacgacacctccggcccctacaccgacccgaacgtacagatagatgtacgtaaaggcctggccgatgtgcgttcggcctggatcgatgaccgtggcgacaccgaactgctcgatggcctgacctcgcagttcggtcagcagcgcctcgccgataccgagctgaccaagatgcgctttgcccaagtgcgcaatccgcgccgcgccaagccgggcaagaacgtcagccagatgcactacgcgcgccggggcatcattacgcccgagatggaattcgttgccatccgcgaaaacatgaagctgcaggaagcgcgtgcggccggcctgctcaccgagcagcacgtcgggcagagcttcggtgcttcgattccgaaagagatcaccgccgagttcgtgcgtgacgaagtggcccgcggccgcgccatcatccccgccaacatcaatcacacggagctcgagccgatgatcatcggccgcaacttcctggtgaagatcaacggcaacatcggcaactcggcgctgggttcctcgatcgaggaagaagtggccaagctgacctggggcattcgctgggggtcggacaccgtgatggacctgtccaccggcaagcacattcatgaaacccgcgagtggatcatccgcaactcgccggtgccgatcggcacggtgccgatctatcaggcgctggagaaggttaatggcgtcgccgaggatctgacctgggagctgttccgcgacacgctgatcgagcaggcggagcagggcgtcgactacttcaccatccacgccggcgtgctgctgcgctacgtgccgctgaccgccaagcgcgtcaccggcatcgtcagccgcgggggttcgatcatggccaagtggtgcctggcgcaccataaagagaactttctctacacccatttcgaagaaatctgcgaaatcatgaaggcctacgacgtcagcttctcgctgggcgacggcctgcgtccgggctcgatcgccgacgccaacgacgccgcgcagttcggcgagctggaaaccctcggcgagctgaccaagatcgcctggaagcatgatatccagtgcatgatcgaaggtccgggccacgtgccgatgcagatgatcaaggagaacatggacaagcagctcgaatgctgcgacgaggcgccgttctacaccctcggcccgctgaccaccgacatcgcgccgggttacgaccacatcaccagcggcatcggtgcggcgatgatcggctggttcggctgcgccatgctctgctacgtcacgccgaaggagcacctgggcctgccgaacaaggacgacgtgaagaccgggatcattacctacaagatcgcggcccacgccgccgatctggccaaggggcaccctggcgcgcagatccgcgacaacgccctgtccaaggcgcgcttcgagttccgctgggaagaccagttcaacctcggcctcgatcccgacactgcccgcgccttccacgacgagacgctgccgaaggattcggccaaggtcgcgcatttctgctccatgtgcgggccgaagttctgctcgatgaagatcacccaggaggtgcgcgaatacgccgccgagaacggcctgaccgacgagcaaaaggccatcgaggcaggcttcaaggaacagtcctcgcgcttcaaggatgaagggtcggtgatctacaagcaggtgtgaagacgataaatgcgctggaggcgggaggctggacgagctccgtgccccggatactgcgggatcacgtcgccagcccctgatgtaggagcggtctcgaccgcgagcttctcgacgccccagcgtcacctgcagcgtcgtagggtggatgtcgcttttttacatccaccgcgtgacgccgctattcggtggttcgataaagcgcgatccaccctacgcagctggcagattgaaagacgatagatgcgctggtggctgaaggctggacgagctccgtaccggatactgcgggatcaggccttcagcccctcagtgtaggagcggtctcgaccgcgagcttctcgacgctccagggtcacctgcagtttcgtagggtggatgtcgcttttcacatccaccgcgtgacgccgctattcggtggatcgataaagcgcgatccacccagccccgcagtgtgggagcggtctcgaccgcgagcttctcgacgctccagcgtcacctgcagttttgtagggtggatgtcgcttttcacatccaccgcgtgacgccgcgattcgcgggctcgatgaagcgcgatccgcctgcgtagcaaaaaacacccggctctgccgggctctccacaacaattctttgagacataacgtgaacattccaggccgctattctccgcatcagcgcatcccctctgaacaccgtgtgttcggcgggcgcgatctgttttccctgtggttttccctcggcgtgggcctgatggtgctgcagctcggtgccttgctggcgccggggctgggtatgagtggcgcgttgctcgccatcgtcagcggcactgcggtcggtgtcctgctgctcggggccgtcgcggtgatcggtagcgataccgggctgtcatcgatggccaatctgaagcgcacgcttggtcagcgcggcgcaatcgtgccggcgctgctcaacctggcgcagctggtcggctggggcgcgttcgaaatcatcgtcatgcgcgacgccgcgagtctgctggcgacacgggcgttcggcgagcatagcgggctggtcagcccagcgctctggacgctgatcttcggtgcgctggccaccctgctggcgattgccggtccgctgaccttcgtccgccgtatcctgcgtaaatggggcatctggttgctgctgggtgcctgcctctggctgacctggaacctgttcgtcagggccgacctcgccggcctttgggcgcgtcagggcgatggttcgctaccctttgcactgggtttcgatatcgccatcgccatgccgctgtcgtggctgccgctgatcgccgactactcgcgttacggcaaggcggcgcggcgggtcttcggcggcacggtgctgggctttttcatcggcaacgtctggctgatgggcctgggcgttgcctacaccctggcattcgccgacagcggcgaggtcaatgcgctgctgctggcgttggctggggccggcttgggtatcccgctgctgctgattctgctcgacgaaacggaaaacgccttcgccgatatccattctgcggcggtttcgattggcgtactgctgcctgtcggtgtcgagcgtctggcgctcgccatcggtgtgctctgcactttcatcgcctggctcgcgccgttggccgaataccagaacttcctgctgctgatcggctcggtgttcgcgccgctgttcggggtggtgctggtggaccattacctgcttcgccagcggggccagtcgcaggtcacggtcatggccttgcgctgggatacgctactcgcctggggttgtggcgtgatcgcctaccacgtgctggccagcgcctggccggaaatcggtgcgagtcttccggccttgcttctgtccggcgggcttctgctgctgttgagtcgtctcggtcgcgctacggcaggtactccggtttcacaatagcgcgcagttccgtgtaggggatttccagttcgggatgcccgctcgaataaggtgcgatgctgtagacgtcatatttgagcagcaccttgtcgcgtagcagtgccacgttggcggtacgcacaaagggccactgccgggcgaactcggcgtcgtgctggttcgccagcagccaacgctgatgcgccttggcagccgcgcgccagaaggcgccctccttgccgggcagcagtacgtcggcgagccctagctcgcggtcctgctctcggtcatagttgatgaagccgcgccccggcatgccatgcgcgccgccggtgtagaggtagctggacagctcgatcaccagcagcgaaccatgttgatcgatcagcttcgattgcagatagctgctccacccgggttcggcgttgcgcagaaaggcctgctggtagccttcgagcgtggcgggcacttcggcgtctgggctgttcacggtcatcttgcgcagccgcgcatcgatcagcgcgttcagcgcaggctcgtcggcgaacagttgggtgtcgatgttgaccaacgggcagcgctcgtcctgttcggcgcatccggtggggcgctgttcgctgatgacctggcgaacctcgaccggcggctcgccgcgaaaatgctgacaggcgccgaggagcaggctgagcgtgatcagagtgacggattggcgaaaggacatggacgttttcatggctcttgtggtggctgcggtgcggtttcgagtgcctgacggatgcgaagttctcgaaccgggcgtcggcaatctttcccgatacgagtggtctgcaaaaggctgcgcctgaataaacggcgcgctaggatgacatctgagaaaccgctcacgccgtgacggttacagcctttccggcgccctgggcgcggacaaaaccgatatgtgagtgattcatgactgataccttcaaacccggtccggatgatgtcgagatcgtcgagcgagagcaatgcttcagcggtttctatcgcctggatcgtctgcaactgcgacatcgcctgttcagtggcgccatgggccggcagctcgagcgcgaattgttcgtccgtcacgatgcggtttgcgtgttgccctacgatcctcgccgcgacgaggtcgtgcttatcgagcaattccgggtcggggcggtcggcaaggtggctaacccctggctgatcgaactggtcgccggcctgatcgacaaggacgagcagcccgaagaggtggcgcggcgcgaagccatcgaggaagccgggttggaagtgggcgagctgtggccggtcacgacctacttcccgtcgcccggcggtagcaccgagcgcgtgcacctctacgtggggcgttgcgacagctccaatgcgggcggcgtgttcggcctggacgaagagggtgaggatattcgcgtgcacgtctggtcgttgcagcaggcattgcaggccgtacgcgacggtggcatcgataacgccgcgagcatcatcgcgctgcaatggctggcgctgaatcgcgacgagatcaggggggcgtggacatgaggcgaacgcgcgaacgatatcgtgtcgatctgctggagctgcaggcggcctgcgaggccaactacctgcggctgatgcgcctgttgccggacatgcgcaaccagccggacattcgccgaatcgccatgagccagggcgatcggctgctcggcgtgctggtgctgaaagtcgtggagagctgcccctacaccaccaccgtgcagatcagccagcaggactgcctgccctggcttccagtgccgcaaatggacgtgcgggtctaccacgatgcgcgcatggcggaagtgatcagtgccgagaacgctcgacgtttccgcggcatctacagctatcccaacgctcaaatgcatcagcccgacgagaagaatcagctcaacctgtttctcggtgaatggctggggcattgtctggcgtgtggccacgaactcgagccggttctgtaagcgcgccgatcggttctgcaatccaaagatcgaggtctgcgttcagcttccggaacccggccgccgcatcgattcgctcgtctgtgatgcatgcccgcatcgtgtggtttacccctgtagctgcgagccaccataattcttttgcgaattcgccaaaggagacgggtcttggctgctgcgcccctcactgctaacaacgattcggtgctgctcgtacagctgaccgacagccatctgtttgccgaggcggacgggcgactgctgggcatggatactgccgcgagcctgcagcgagtcgtcgacctggtcttgcacgagcaacccagcgtggatctggtgctggccaccggagacctgtcgcaggacggctcccttgcctcctacacgcggtttcgtcagctttccgagcgcatcgatgcgccggcgcgctggtgtcctggcaatcatgacgagctggacgccatgcgcgaggccacgctcgacagcgacctgatggagccggtgctggaaatgggcgcttggcgcgtggtgatgctcgacacgctggtgccgggctcggtgttcgggctgcttcgtgacgatcaactggaattgctggagcggactctcgcacaggcgccagaacggccgcatctgatctgtctgcatcaccatcctgtcaccatcgacagtcgctggatggacagcatcggtttgcacaatcgcgaagcgctgttcgaggtgctcgatcgcttcagttgcgtcaaggccttgctctgggggcacattcaccaggaattcgatggctggcgcagcggtgttcggttgctggcgacgccgtcgaccggcgtgcagttcgcccctggcagcgaggatttccaggtcgatacgcgcgcgccaggctatcgctggctgcggctgcatgccgacggcgcactcgaaacgggcgtctcacgcgtggttggcgtcgatttcgaggtcaattacgacgtcaagggctactgacgtcacgtcagtctgcggacagcggtttttcgagtcacgcgaagggtgctcgatgcccaatcgccgctcggacggcgggcgcagcttgcagcctgcgtatctcgcctagtagcctttcccgtcttttgccagctcagcgaaccagcatgacccgtacgcagcccgccattgtttacatgcacggcctcaacagctctccgctgtcgcaaaaggccagccagctgaccgcggcactggagcgtatcggctcgatcgaccggttgcgagtgccggcgttgcaccatcatccgcgtcaggccattgcccagctcgaggcggccattgtcgaactggggcgccccgtgctggtcggcagctccctcggcggatactatgcaacgcacctcgccgagcgccacgggctcaaggcgctgctgatcaatccggcggtgacgccgcatcgccacttcgacggctatcttggcccgcagaccaacctttatacaggcgaggtctgggaactcaccgaggatcacgtcacggctctcgccgagctggaagttccgccgccgcgagatgccgagcgctatcaggtctggctgcagaccggcgacgagacgctggactaccgccatgcggcgagcttttaccagggctgtgcggtgcgcatccaggccggtggcgaccatggcttccagggcttcgccgagcgccttcccgctttgctggcgttcgccggcttcgatccggccagcttcgcagaactcgatttttccgattcataaggacatcacgagacgcttatgtcttataccgccgaagccattgaagtcctgtcgggcctggaccctgtccgcaagcgtccgggtatgtacaccgatacctcgcgacccaaccacctcgcgcaggaagtcatcgacaacagtgtcgacgaggccctggcgggtcacgccagctccgtgcaggtgatcctgcaccaggacaactcgctgcaagtgatcgacgacggtcgtggcatgccggtggacatccacccggaggagggcgtttcgggcgtcgaactgatcctcaccaagctgcatgccggcggcaagttctctaacaagaactaccagttttccggtggcctgcacggcgtcggtatctctgtggtcaacgcgctgtcgacccgggtcgaggtgaccgtcaagcgtgatggcaacgagtaccgcatggccttcaccgatggtttcaaggccagcgagctggagatcatcggtacggttggcaagcgcaacaccggtaccagcgtgcatttctgggccgacccgaagtatttcgattcgccgaagttttccatcagccggctcaagcacgtgctcaaggccaaggcggtgttgtgtccggggctgagcgtcagtttcgaagacaagagcaccggcgaaaaggtcgaatggcattaccaggacgggctgcgttcgtatctggtcgacgcggtcagcgagttcgtgcggcttcccgatgaacccttctgcggcagcctgtccggtagcaaggaagcggtcgactgggcgttgttgtggctgccggaagggggcgacagcgttcaggaaagctacgtcaacctgatcccgaccgcgcagggtggcacccatgtcaacgggctgcggcaaggcctgctggacgcgatgcgtgaattctgcgagttccgcaacctgctgccacgcggcgtcaagctggcgccggaagacgtctgggagcggatcgctttcgtgctctcgaccaagatgcaggagccacagttttccggccagaccaaggagcgcctgtcgtcgcgcgaggcggcggcattcgtctccggtgtggtcaaggatgccttcagtctctggctcaacgcccatcccgaactgggcatgcagctcgccgaactggcgatcagcaatgccgggcgccgcctcaaggccagcaagaaggttgaacgcaagcgcatcacccagggcccggcgcttcccggcaagctggccgattgtgcggggcaggatccggcgcgctccgagctgtttctggtcgaaggcgattcggccggcgggtcggccaagcaggcccgcgacaaggagttccaggcgatcatgccgctgcgtggcaagatccttaacacctgggaggtcgatggcggcgaggtgctggcgagccaggaggtgcatgacatcgcggtcgccatcggcgtcgatcccggagcggcggacatgtcccagttgcgctacgggaagatctgcatcctcgccgatgccgactcggatggcctgcacattgccacgctgctgtgcgcgctgttcgttcgtcacttccggccgctggtcgacgccggacacgtgtacgtggcgatgccacccttgtaccgcatcgacctgggcaaggacatcttctacgcgctcgatgaggccgagcgcgacggcatcctcgaccgtcttctggccgagaagcgccgtggcaaaccgcaggtcacccgattcaagggcctcggcgaaatgaacccgccgcaactgcgtgaaaccaccatggaccccaacacccgccggctggtgcagctgaccctcgatgacttcgacggtacccgcgagatcatggacatgctgctcgccaagaaacgcgccagcgaccgcaagaattggctcgagtcgaagggcaacctggccgaggtgctgatttgaaccgttgctggcttttattgctgctggcgttggtggcaccggcatgggctgccgaagacctttcggagctggcgctggtcagtgagcatcctgtcgagggcatcgagcagggaaatctttccgggctggcctggtgcggcgacgcgctctgggcggtgtcggaccgcgaagacaacgtgctataccgactcgatgccagcgataccgtctggcgcgccgaagccgagcacttcgagctgccacccgtgccgaataccgggctgtcatggggcgtgcgcatacgggccgccattaccggcatgctgcgcggcggtgagatggatttcgaggggctgagctgcgacagcctcggcaaccgctatctggtcagcgaagcgcacgcggcggtgctgcgggtcaatccggcgggtaccgcgcaatggctgagccttcccgatggtctggttcgtcaggcccgtgcgagcggcatgttgctccagttcaatgccatgttcgaaggcgttgccgtcgacccggatgctgatcgcctctggcttgcggccgaacacagtcgtcgggggctgctggtgatgcatcgcaagcagaacgcctggaagtgcaccggcggttgcgtcttgatggtcgaagggggccgcgagtcgccgccggcagcaatgaatgaaggcgaccagccgcgacggttttccggcctggctttccatcaggacaaattgttcaccctcgagcctgtccggcatcggatctgccgacgcaagccggccaccggcgatagcgaggcgtgctggacctacgccaccacggcgctggccgatgcacgtcgctacgacacgccgttcggcaatgccgaggccttgtgggtagacgcagagggcgcctggatcggtatcgataacaatgggatgacgcgtgccgatggcgaaaaacggccggtcgtctggcgcttcgccgctcccaagggcggatggggtgtcaagcagtgacccagccagccggccgccgtgccggccgcgtcatgctggtactggcatggggcgcggggctgctgctggcgacgcgtttcttcgccgactgggagcagagtcgcctcaatccaaaccgcgaacccgtttcggtggtacagggaaatcacatcgaggtgcggttggtcagcaatggccagggccatttcgtggcggacgggctgatcaatggcctgccggtaaccttcttgctggataccggtgccacggatgtggcgatccctgcggagcaggccgaacgtctaggtttgtcccgtggcgctcgcgttgcgctgcagacagccaacggccccagcacggggtatcgcaccacgctcgacagcctcacgttgggcgacatcgtgctgcatgatgtgcgtgccctcatcgcgccaggctttggcgcagagcaggtgctgctcggcatgagcgccttgaagcagctcgaattcacccagcgcgcaggcaccctggtgctgcgccaggaaactccctgaaggcgggcttgatgaccacttccatagaggcgaccgtaccggtactggcatcgctggatctcgacgagagccgtgatttctacgtgagccatctgggctttcggctgctgcgacaggatgccgattacctgatgctggcgcgtgacggggccgagctgcatttctggctgtgcgcggatcgccatgtggcagagaacacgtcctgctacgtgcgcaccggcgattgccaggcattgttcgatgagttcagccggcacggcttagcgctacagccgccggtgttgcgaccatggggcatgaaggagctgtacgtcatcgacccccacggcaatctgctcaaattcggcgaacacgcctcgataacatccacctctagtgaagaaaactgctcatgagcgaaaccctggacctgagcctggacggcgtcgagcgccgctcccttgccgacttcaccgagcaggcttatctcaattattcgatgtacgtgatcatggatcgcgccctgccgcatatcggcgacggcctcaagccggtgcagcggcgcatcatctacgccatgagcgagttggggctgaacgccgattccaagcacaagaaatcggcgcgtacggtcggtgacgtgctgggtaaattccatccgcatggcgattcggcctgttacgaggccatggtgctgatggcgcagccgttcagctatcgctacacgctggtcgacggccagggcaactggggcgcgccggacgatccgaagtcattcgccgccatgcgctacaccgaggcgcgtctgtcgcgctattccgaggtgctgctgtccgaactgggccagggtacggtggactgggtgcccaacttcgacggcacgctcgacgagccggcgacgctgccggcgcgtttgcccaatctgctgctcaatggcaccactggcatcgcggtggggatggccaccgacgtgccgccgcacaacctgcgtgaagtggccgccgcctgcgtacggctgctggacgatccgaagacgacggtcgagcagctctgcgagcacgttcaggggccggattatccgaccgaagcggaaatcgtcacgccgcgcgccgatctgttgaagctctacgagaccggtcgcggctcggtgcgcatgcgcgccgtgtaccgcgtcgaggacggcgatatcgtggtcagcgcgttgccccatcaggtatccggttccaaggttctggagcagatcgccgcacagatgcaggccaagaagctgccgatggtggccgatctgcgcgacgagtccgatcatgagaacccttgccgaatcgtcatcatcccgcgctccaatcgcgtcgatgccgacgagctgatgcagcacctgttcgccaccaccgagcttgagtccagctaccgggtcaacaccaacgtgatcggcctcgatggccggccgcaagtgaagaatctcaaggtattgctcagcgaatggctgacctaccgcatcggcacggtgcgtcgccggctgcagttccgcctggacaaggtcgaaaaacgcctgcacctgttggaaggcttgctgatcgcctttctcaacctcgacgaggtgattcacatcatccgcaccgaggaccagcccaaaccggtgctgatgtcgcgtttcgagctctccgagctgcaggccgactacatcctcgatacccgcctgcggcaactggcgcggttggaagagatgaagatccgtggtgagcaggacgaactggccaaggagcgtgagcggctgctggcgctgctcggcagcgaggccaagctgaagaagctggtgcgcaaggaactgctcgccgacgccgaaacctatggcgacgaacgccgctcgccgatcgtcgcgcgcgctgaagcccgggcgctgtcggaaaacgagttgctgccctccgagccggtcaccgtcgtcatttccgaaaagggctgggcgcgctgcgccaagggccacgatatcgacgccaccggcctgtcctacaaggccggcgatggcttcaaggctgccgctcccggtcgctccaaccagtacgccgtgttcatcgactcgagcgggcgcagctactcgctggccgcgcattcgctgccttcggcacgtggccagggcgagccgctgaccgggcggctgacgccgccgccgggcgtcagcttcgagtgcgtcttgctgcccgatgacgaggcgttgtacgtgatcgcctcggacgccggctacggtttcgtggtcaagggcgaagacctgcaggccaagaacaaggcgggcaaggcgctgctgtcgttgccggcaggtgcgcgtgtggtggcgccacgcccgttggcgagccgcgatcaggactggctggccgccgtcaccaccgagggccgtctgctggtcttcccggtccgcgacttgccacagctgggcaaaggcaagggcaacaagatcatcggcattcccggtgatcgtgtcgccagccgtgaggagtatctgacggggcttgccgtgctgcccgaaggggcgacgctggtgttgcaggccggcaagcgtaccttgtcgcttaaatccgatgacctggaacactacaagggcgagcgcggacggcgtggaaacaagctgccacgcggttttcaacgcgtggatgggttgcaggtggaaaccacgaactaagctggagagtattagagactggcttccagcgtcggtttcacggaagatagcggccttcaaattttcacccgttcgcgatgcggctgtccctcagccgcatcgagagccaaagacgatcggtacgacgatgagggtgactgtgcagctgggcggatagacgcccatcgcctgccaggtcgcctgggtccggtgccaaggtagagacgaacgtgcagcgcctcacaactgttttgctatttgcctgtgtcagcctggctggctgtgtgactcaacccgtgccgatgtaccgactcgacaacggcgctgtagaaacacctgcgcaagcagcggatggcgtggcgatcttgctgggcccggtgaggctggccgactatctgcagcacgacgccttgctgcagcggctgccggatggaagcctggctgccgatgggcaacaggcgcgctgggccggtgatctgcaaggcgacatcaatcagctgctcatgcggcagctggcctggcgcctgaatacgcagagtctcgagcttagccccggtagcaagggcttcagccccgatgtccaggtcgaactggaaatcactcggctcgattccggtccgcagcaccccgcggtgctggaggcccaatggcggctgctggacaagcagggcaagcgtcagggcagccgtctggtccggcttcaggaagagcatcaaggcaccacggccgatcaggtgcgggcgcagagcgtgctgctgcaacgcttgagcgagatgatggcagccgctatcgagccgatgacggttgccaagacgccggtcaaacgcaatgtcgtcaaggcgcccagcaaacccgccgcgcccccggcgattcctgcggtcgagccgatcaggaccgatctggaagtgtttcgcttctaataccgccgccgaggcgattgcctacagccaacaaggcccggcgcgaatggcgatcaagccattccggcgggccttttgctgtgtgggctgatgcctgcaagggcgtgtctaggccgcagagatccagctctatcgtcaccgctatcagctatccgctatccgctaacggggcgcaggcgtgctatgcctcccgctgtcgcagcgatttagcggcggttgcgcagttcatgcatgcgtgcgagttggcgctcgagcagggacgggtagggatcgagcaggcgctcgacgcagcaggcaccttctgggctggctatggggcgaatccgagcgcgctgaaggatcaggcggtcttcaccgatttcgcgttcgatcagcagtaggttgcggctgtgctgtgacatggccagagccgcctgtgcgggttcgctgagcagcaggtcgccctggctgaggtcgtagagtccttcaccctgggtcaggcccagttgcaggttcagggtaaggccgctatcggcgacttcgatctgcaaggcatgtccgagtgcgcgcatcaactcgccgcaacacagggcatgggtcagatagttctgctcgtcgtcctggctgtggaacagcatcaggctgctgccgtcgttgagcgtatgcagttcggcctgatacagcgtggcggcctgctccaggcaatcgcggtagcgctgcagcaagtcggtgagacggtcgcgaggcagacggcgcaattgctcctgggcgccgagctggatcgccagcacgccgctcttgccggcggtggccggtatcacgggggcaggagcgattggcgctggctgcggcgcgggcgtttcgaaggacggctcttcgtcgaactgaaggggttcgtctggttctgccagcgcggagccgatcgagcgatcgtcttcgtcttcatcatcgacgtggtaggtccggtcgatcccgctgtgctgataggcagcactcggcgccgcggccggcgtgtcgaagtgtgccgaatagagatcctgcatgctgtcgtccagctcgatctcgggttccggttcctcgggtaccaggcgtgcttggagctgcctggccaggtcgccgatttcatcctgccggccggcgccgggtgccggatcgtccgggtcgcgaagccatagacgcagctgcatcaggggcagggagatctgccggcccaggcgggtgctgaggatcagcgtcaatgccagaagaatcagcgcgagcaggcccatgctttgcaggctgatggtcatgggctgctggaactgccgcatgtccaggctgatgcgcagatgcccggcgattacttcctggaagctgatgggtgtggaatacagcccttcttcgtcgcccagcagatttcgctgcgggcgcgtgccggattcggccagcacgcgattgtcgacgctgtagatcgcggcatgggcgaccagcgggttcttcaccagattgcttagcagcacgttgaggctgaggatgtcattggccaccagcagatcggttgccgaggcggcggtctgggtgatcaggctctgccccagggcctcggcctgctgttccatcgcatgcttgaactgcatgcccatgacccaggcgtagatcaccagggccaaggccaccagcagcagggtgtggctggctacccgcaacaccaacgggatgcgccgctggcgtagtgcgcggtagatcagcaggaagaaattgtcgggcttgacggatgcgggccggttcacagagcgcggctctactcttgaggaaggtgccgcgcagtatacggaaagcgcacagggggctaaaggtcacccgggaaaagctggcgaattactcggtgtcgagtgggaaacgaccacatcgagaggggcatggccgctggcagcgctcagccagcggccggctgttgtagaatgccggccttctttgcataggagctgcgccttgcgtgaaatcgtcctgatcaatatcaccggggaagatcgccccgggctgaccgcggccatcaccggcgtgctcgctcaaggtggcgtgaatatcctggatatcggtcaggctgtgattcacgacaccttgtcgttcggcatcctggtggaaattcctgataccgaacgggcctcatcggtgctcaaggatgtgctgttcactggttacaagcacgatcagcaggtgcgtttcacgccggtggccgaggacgactatcagcagtgggtcgcagggcagggcaaggcccggcacatcgtcacgctgctgacccgcaaggtcaccgccgagcagttgcagcgggtcagttcgatcaccgccaagtatgggctcaatatcgatcacatcgatcgcctgtccggtcgccagccgttggacatgcccgaagagctgggcaagggctgcatcgagttttccgtgcgaggggagcccgccgataccgctgcgctacgtgccgagttcctcagcgtggcgcaggagctcaatgtcgatatcgccttccagcgcgactccgtgttccgccgcaatcgccggttggcggtgttcgacatggattcgaccctgatcgaagcggaggtcatcgacgagctggccaaggtggcgggcgtcggtgatcaggttgcggagattaccgagcgcgcgatgcgcggtgagctggatttccgcgccagcttcaaggagcgcctggctttactcgaagggctggaagagcgcgcgctggccgaagtcggtgctgggctgcggttgaccgaaggggccgaactgctgttcgccgagctcaagcggctgggctacaaaacggcgatcctgtcgggcggcttcacctattttgcgcgtcagctccaagccaggttgggtatcgactacgtctatgccaacgagctggaaatcgtcgatggcaagctcaccggtgtcgcccaggagccgatcgtcgatgcccagcgcaaggccgatctgctccgcgaactggccgagcgcgagggcttgcggctggagcagacgattgccgttggcgacggggcgaacgatctgccgatgctcgggcttgccggcctgggggtggctttccgggccaagccgctggtcaagcaatcggccaagcaggcgatttcgacgctgggcctggacggtattctctacctgctcggtttccgcgatcgcgagggaacggagtaaagccgaaaagagcgctggtccccttcacctgagcaggggacgcctagctgcccagtctccagctcttgcctattcgtcgtccgacgagaagttgtagtccatcgactggctcggcccctgcaagtattggccctggatatagcccaccccggcctgccagagcgtcgcaaggatggttgcgctgtcgacgaagggcacgatggtctgtttggcctgttcatgcagatcggcgagcagttgcttgagcgcgtcctggctctcctggcggctcagctcctgcgtataggaaccgtcgatcttgacgaaatcggcacccaggtgtttgagcgtattgaacgggttcagcacgcagccgaagcggctcagggcgatgcgacagcctagtccgttcagcccttcagtcagggctttcgcctgtttcagataggcgacggcgtcctgctcgtcgatctggaaaaccagcgagtcgggcggcaggcgcgaagccttgagtgcgatgccgagccagttaagcagcgcgggatcctgcacgctggcgctcgagatatgcacgaacaatcgcgtgctgtgccctttgctgcggtgctcggcgagcagtttgatggagttgagcagtacccagcggtcgattcgggtggccagcccggcctcctttgctgcgccgaggaactcgccgggcggcacctcgacgccttgcgggtcgagcaggcgcagcagcacttcgtaatgctcgtggctgtcgccccgcaggctgatgatcggctggaacagcaggcggaagctgttcttttccagcgcctgctgcagcatcgccagcaggttgccgcggttggcggcggcggcgagctcggcagcaggatcgtagatgcgcagcgcattgccatcgctgagctcttcggcgcagcggtgggcgcggtcgattacgtcccgtgctttcgccgtttgttcatcgagcgcggcgaggccgatgctcaggctggtctgaacggtacgaccgttgatctcgaacaggtgcccttcgaccttgcgcaacagctcgacaagcattggttccagctgctgcggtgtggcatcggccatcagcagcgcaaaggcatcgtcaccgaagcgcgccagctccgccgatggctcgaactgcccgcgtaacaatccggccagctcggcgagcagacggtccgagtcgcccagaccgatctcggcctgcaggctggcgaagcggtcgatgcgcaagtaggccaggctcgagcgctgtccggcgttcacggcgcgctccaccgcgccatcgagcagctcgaggaagtggttgcggttatacagtccggtcacctggtcctggctgctgatttcgcgcagtttttccagctcttcattgccgctctctgcgcggatgacgacctggatgcagggttcgccgtcgtaggtggcgggggaaaagtgcatgcgcgccttgaaattgccgccatcggcgcggacaccgccgcacaccagctcggcgctgccctgcagggactggtagcgcttcaaaaagcccttgaattcgccctgatcgcacgaggcgatcaggtcgatcatcggcatgccttcgagttcttccacgtcttcgtagccaaacagctcgaggtaggcgcggtttgcatagatatgcatgccgtcatgaacgtacgcgatagcgtctaccgagctctccagcaacagctggcaacgcttctcggcctcgcgtaatgctacctctgccgatcgccgggcgcggcgctcgtcgagattcgccagctcccggttggcgaccatgatcaaccattcatcctcgccctgcggcagcgcacgctgggcgcccaatgccagggcttcgctgatggcgtcggtgtcgttgccgtcgatcaactggatgaccgggatgtccttggcctgcttgcgaatggctccgatggcttcgcttgggtcgagattgctgctggtcggcgcgctgatcagcaagtcccaggtctgttggagcgcgtcggcaaggtcatcgctggagatgagccgatgcacgcgcgtcgcctggcccgcgttgcgaaacaggctgaccagtcgctcagcttcattctgcgaatcctcgaggatcagcaggcggatggttttcttttgcggggccatggcagcagctttggattgcgcctgagacgggcgttggggctaaggaacggtgtgccgcaatctacagcgtgtgccagagtgagtcaaaatcttcaccgcgcggtgccgactgggttccccgggctgtgatcgacgtctcccggggcgtcgcgacgcccacccgttggtattcgaactggctgtagctgccggtgccggcctggcggcggcatagcagcgcgcggagttcttcgccgttctgattgatctgtaccttctgcccttcctggaacggcaagcggggcacgatcagtgtcgccggccgcgagatgaccgcgatttcaggcagcatcaaggcgcgcaagtattcgctgccctgctcggtcttgcgtagcaggcgcaggccgcaaggttgcgcagacggggcgatgagctcgacgcccatttgcgggccgccgcccctcaattggcgaatccagcgcaccaccgcgatgctccaggcctggctgccagcgtcctgcaaaccaagcaattcaccggtctggagctgcgccggcacgtcatccggccaggacaggcagaagccgccggggctgtggtcgactcgatgcacctcgaaggttggaaaggcgttgtccgccttcggctcgtccggcggcccgctctcgggcgtcacagccgcggtggggcggacgaattcgatatggtcgctcggcaggatctcttcaccgctcatcgcctgggcatcgaaggcgacagcccagacatccggcgcggcgttgttcagcttgaacacggccgagcgtgtcgcatcgggtcgcttcagcagttcgccgaactcgcgctggcccgccaggtaatagtgcagcgcgctcatgccgatgcacagcttcatcgaaccttttgccggggtgcgctggaagctgcgctcggaaacatcgccccacgcggcgctgacgtggtgcaacagatcgaggctcactccctcgggcagcgcaagcgtccggtcctcggctgcctccggagctgactgcaggtgttgctcgatggcccggaccaggccatggggatcgatgccgagcaggtaagggcgctcctcggcggcgaacatcgatcgatagcgtggcggcccatcgatacgtgcagaaacgccgaactggctggatgggccgggcgtcttttccaggcgcaccagcgcactccagggctcgagcaactgtgccagctgggcgatgttctgctggcgcatctggttgcagcgggcgctgccgatcatcagggcgacgatatagctctgctcgatgctcaggcccttgacccggtagcaaaggtcgtcccgtacgacggtgcgatggagtccatgcgcaacggcgatcgcgtacagctgatgaagctcgaaccacaagccttcgggagttgggttgtacagctgggtggagcgaaccagcatcgcacataggctgcggatcgcgcgttgtagcgagatggtgaccagctgcaggcgttcacgcccggtctgtggcaccagttccacaacaatcagcttgtaaccggtagcgaggtggctgtgcagcgcctgacaaaggctcgccactttgcgtgggcgctcgccgagcacgatcggctggtgatggaggtgacgttccagctcacggcaaacgaagtggatttccggccgtagcagctcaagcagctgcagacgcagctgggcggtcgtgcgcagcttgttgagttcaagcaaggcctggtacagctggcgggccgtctcgccgaggttggccttggggaggccggacagccactgctttacgccgcgcacgctgggttcgcagaaggacagcgcctgagtgttcggcgtcgtcacgcgtagcaacaatggttggctttgattttccaaacgatcagctccgtggcaggcgttccaacgcaccgctggcgatcctgccggtgcgggtcgggcgcccatcacaatgtgatatcaaaatgcaactgtaacagtcacatcataacggacacggagcacttggccagcgatagccgaccattggtgcgatgctaaggctgtgtcggttcgtcagccgggagggtggcgggcggtgtcgccttggcctgtcccagtccttcgcccatgcacaccggggtcaaggccgatagctgttcggcccagctgacctggtccggcccgaatagcagtatcaccgtcgagcccagcttgaaacgacccatctccgcgcctttttccagatgcacggcggttcgggccgcttcatcgtagcggacggtcttcagggtccgcttgggtggtgtgaccaatccggcccatacggtttcgatgctggcgacgatcattgcgccgaccagtaccatcgccatcggaccgcgctcagtgtcgaacaggcagaccacgcgttcgttacgagcgaacagctccggcacgccctcggcggtcacggtgttgaccgagaaaatccggcccggcacgtagaccatttcacgcagcgtcccggccagcggcatgtgcacgcgatggtagtccttgggcgacaggtagacggtggcgaagtccccgcccatgaagggagctgcgcgctcatggtcgccaccgagtagctcggtgacgctgtaactgtgtcccttggcctggaatatcctgccctgctcgatcttgccgagctggctgatcgccccgtcgcaggggttgagtatcgcaccgggcgtcgggtcgagtgggcgcgcgccgtctttcaaggcccgggtgaagaaggcgttgaagtgttcgtaggcgctggggtcttcgatctgcgcttcgtgcatgtcgacctgaaaatgcttaacgaaccatttgatgaaggtgttcttcacccaaggcaggcggcactcggccacgcaaccggccaggcgcgaaatcaggtgatgcggtagcaggtactggctgagtacgaacaagcgttctttcatggagagccttttcattgctggatgggggtgtcgggcaggttgccccattcgccccaggaaccgggatatcccttgatgcgcggatagcccagcgccttggccagcaggtaggtgaagcccgagcgatgatgcgtctggcagtgggtgatgatttccttgtcggccgtgataccgagcgcctccaggcgctcggcgatgtcctcgcggatgcgcaatgcgcgcgccgggtccatcgctgcggtccattcgaagttgattgcgcctggaatatggccagcacgtgccgccagcgccttctcgcctcggtactcctcgggcgagcgggcatcccagatcaccaggtccgcggagccgagccggctttcgatgtattcgtgggtggcgctgggtgtttcgctgagttgcaatgcgaccggcccgcccgctgcggcagggctgtcctgcgatagcggccgctgctcggccagccaggcacgcaggccgccgttgaggtagtggtaatgccggtggccgatgacatccagcagccagatgaatcgcccggcccagccgccgccttcatcgtcatagacgacgtagaccgcgtcggcccgatgcccgagcgcgccgaacagagcttccagctggggcttgccgggcagcagtccgggcgctggcggctggccgagctgggtctgcttggggtcgacgaatcgcgccccgggcaggtggccttcggcgtagcgggaagcgctggtcaggtcgaccagaatcagttcgggcgcgcccagacgctcggccaggtcggccggctcgatgaccaggggcagggttgaaaaagcggacacggcaatcctcgctcgttcgggaagggccaagtctagcgaaaaaatcagcgaccgcgcttgctgaaggtcgctagggctcgctcgatgcattggacggtcttggtgaacaactgcaggttcgcttcgctgaaagcagtgttgttctgatccgccgctagcagcatcacgacccggccctcatggccaatcgagcgcagcagcaggtgctcgctgggaaacagcgacttcagcgcccctggcagcatggccgagaactgcgccagattgtccggcttgagtcgcagcagtgcgggtttttcgagcagcttgcgcagcacctggctcgaatccacatcgagcaccaggcgcgcagcctcgcgtggcaggccactgctctgctggctgacaaggcgccgttgcttgcggtcgacgagcatcaacagcacccgttgcaggccggcacagctcagggcgttgcaggcggccgcggtaagttgaacgatgttgtcgtatgggcagggttcgctaagcaattcacggcaatgcgcgcgccattgcgccgacgcttcggtatcgggcgatgcggcggtccgctcgacctggaagacgcactcccaaggccagagcaggccctgagcggggtgccagagatcggtcgctccgatcgcgcgcgcactgctggcggcctgctgatgcaccatctgctgcagctcggccagcggaacctgcagatagaggccggccagccgctgccagcgcaggctatgaacgccgctccagctgtggtgcgccgacagcgccaggccgttggccaggacaatggtgttgctcgggagcgtaagccagcgacgcagcggcgggtcggcatcgagcatctgctgctggtgcagcgggtgctcgttgtcgcgagcgatatgcagcgccttgatcagcatgcgtcgatgctcgttgagcagctggtagccctggatgatccagtcgggcagcccccagcgcttggtggtcgcgatacagagttccagcagcgacacgccgagcagcgactgctcgacctggcgagccggttcgcgcttgaccagcacgcgttgctcccactcattgagcagctgtgggtgggccgcgaccatcgcccagacgggggcgaggaacagcaggctgccccaatggatctcttgccagagccgcgcaaggcgcgaagcgaacagcccggcggcctgctggctggcgtgctggctgatgagcatcacctgtcgcagcggcgccggtatctcgtcaggtctagcggcgggaatgtttgcgaacagggcctctgcgcgcttcaggccgatacggctgagggcgacttccaggctttcggcgggtttgctgctcgccgccgcgccgcggttggcttcgcggatgacgaccagtgccagggccgggctcgtctggatcagctcggcgatctgtcgcagggacaggctactgtcgcgcagtgctcgctggacgcgggcgtacggagcggcagccgcgggcagcacgacggcgtccagtgcatcgagccaggcgtcaagcgtgcggggtacttgggtcattatgatggcgccgtcgaactagcatttcatcgggatggcctttagtctggcgcaaaagttccgataaccagaacaattcttttcatctgccccttcgcctgtccccatgcaagcttgtgcgacgtcgcgcgacttgtttcaggtgccctgagatcaggttctagacgtaccttctatggcaaaaatcatcggcattatcgtagttatcgccagtgtgctcggcggctttgtgctgtccggcggcaagctcggcgcgctgattcacccgttcgaggtgatgatcatcggcggcgctgccctcggcggtttcctgcaggccaaccctggcagcaccaccaaggtggtgttcaagaagtcgctgcagatgttcagctcgcggttcacccataagtactacctggaagtcctggggctgctctacgagattctcaacaagagccgccgcgaaggcatgatggcgatcgaggccgacctcgaagaccccagcgccagcccgatcttcagcaaatacccggcgatcctcaaggacgaccggatgacggcgttcatctgtgattacctgcgcatcatgtcctctggaaacatggccccgcatgagctggaaggcctgttcgacatggagctcaatggcctcaaggaagagctcgaacacccttcgcacgcggtgtccaagatcgctgatggcctgccggcgatgggtatcgtggcggcggtactggggatcgtcatcaccatgtcggtgctggccgaggccaacaacgcggaaatcggcgagaaggtcgggaccgcgctggtgggtaccttcctcggtatcctcgcgtcctatggtttcttcgggccgctgtctgcagcgcttgaacacgatgccaaggaagaggtgaacctctacgagtccatcaaggcgaccctggtggcctcggcatccggcatgccgccgacgcttgccgttgagtttggacgcaaggtgctgctgccggcgcatcgcccgagcttctccgagctcgaacaagccatgcgtggtagctaagcgacatggaaaacacccagccaatcatcgtcaagcgcgtcaagaagtcggccgccggccaccatggcggcgcctggaagattgccttcgccgacttcgcgacggccatgatggccttcttcctggtgatgtggctgatgtcttccgccacgccggagcagaagcgcgccatttccggctactttcaggacccgatcggtttcaccgagagcgcgagcccgcacgtgatcgatctcggtggcacgcccacgcccgccccggatcgcacactcaatgacatgatcgatccggcggccaagcagaccgaggcgtcgctagacgccgagcaggtcgaaacgctctccgaacagctggagcgtgaacgactggagctgttgctacaggagttgcagaacaaggtcgacgagaatcccgatctcacccgcttcaaggaccagatcctgttcgagatcacccaggacggcttgcgcatccagatcatggatgctgccaacaggccgatgttcgccctgggtagcgcgcagcttcagccttatttcgaggacatcttgctggcgatggccgataccatccgcgcagtgccgaacaagatcagcgttagtggccataccgatgccaagccctattccggccggggagatttcggtaactgggagttgtccgccgggcgtgccaacgccgcacgacggacgctggtcgctggcggctatccagaggatcagatcgctcgcgtggtgggttatgcctcttcggccctgttcgaccgtaacgatccgctgaacccggtcaatcgccgcatcgatattcttgtgctgacgaaaaaagcgcagcgcgacatcgaaggcgaacagtcggatgccgaagcgaccaagccggcagccgacaccagtgctgcggcaccagcagccaacgcaagcgagccactacaggccgctccgctgcgcgagcggctgaacatcttcgaggacggcgtgctgaagttcgatcagccgggcggcgaatgatcgccgtgcggggttccggctagtactcggcttccggcaggctactgatgatgtgtcgatagctggccatccgttgcggctggatccgcccctgttccagcgctttcaagagtgcgcagcccggttcgcggtcgtgcttgcagtcgcgaaagcggcagtgcccgagcagttcctgaaactcgatgaagccggcttcgacgtcgccgcggctgacatggcccaggccgaactcacggatgcccggcgagtcgatcagctcgccgccaccgggaaaatgaaacagtcgcgcggtggtggtggtatgcgtgcccttaccggtcaattccgacagcgcgccgacccgggtatcgacgcccggcagcaggctgttcaccagtgacgacttgcctacgccggactgcccgacgaacacgctgacatggccgtccaggcgtgctttcaggctgtccatgccggcgccgtcatgggcggacacctccatcagtggatagcccagcgttcgatacaccgccagcaacgcatcgagagcgccctggttctgggcatcgatcaggtccgccttgttcagcaacagcaagggcgtgatgccggcatgctcggcggcgaccagatagcgatcgatcagattggcgtggggttccggcaggggcgcgaagacgatgacgatcaagtcgacgttggccgccaccggcttgagctggccacgggtatcggggcggcacagttcagtctgccgtggcagttgcgcgacgatcacgccgatgccttggttgccgggtcgccagaccactcggtcgccggtcaccagggctggcaggttggcgcgtaaatgacagcggaacacctgaccgcaatgttcgccttcctgcgcctcgacttccacctgcacgccgaagtgagcgatcaccaggccggtttgttccgggccgagatcgccaccctcgagctcttcgacggcgcgcgattctcgccgcgcggcccgcgaggcgcgctcttcctggattttctcgatgcgccagctttgtcgacggttgagttggcgtttggccatttatgtgcggtgcccgggctggaaaagtaggcgagtctagcatgcccccgcgcgtggctacggccctgtatgggctgcggccggaggggtagactctgtgtcggttcccggtctgatgagcgcctatgcgagcgttacccttcgcgcggtttcccgtcctgctggccatgcttggccagctgctttcgctggtcttcacctggtttgcgttgctcgcgctggcgcgcctgctcgactggcatgtcagcctgctcaccgcggcctggctgcagggtgcgctcgcagcattgctgggcctgcggttcggcctgtcgcgttggtggctgccgatcaacatctgtttcgtaccggggctggtgctgatgcagggccatgcgctgccgccctggctgctgctggccggctttatcgcgttgttgttgctgaactggaatgccctgggcgagcgggtaccgctgtacctgacaggcaccgcggccgaacagcgcctgaagcagcgtctgggccatttgccggatggttttcgcttcatcgatctgggcagcggtttgggcggcaccttgctacggctgtcgcgggcctatcctgccgcgcacttcgccggtgtcgagaccgcgcccttgaccttcgcgctgtgctggttgcgctgcctgttccagcgtaactgccaggtgcgctttcgcagcttctggcgcgagccgctgggcgattacgacgtggtctattgctttctctcaccggcacccatgccggcgttgtggcgcaaggcgtgcgacgagatgcggccgagcgccttgctgatcagtaacagcttcgaggtccccggtgtcgagccgcaggaaactctgccggtcgatgactggcgacgttcgcgcctgttgatctggcgtcctggcgtcgatgcgcaacctgacggccgttgcgcgaacggctaaactgcgcgccacagccgaggagcccaccatgcagaacccccagaatctcatctggatcgacctggaaatgaccggtctggatcctgacaacgatgtcatcatcgaaatggcgaccatcgtcaccgacagccaactcaacgtactggctgaaggtccggtcatcgccattcatcagagcgacgagattctcgccggcatggacgagtggaatacccggcagcacggcggttcgggcttgacgcagcgcgtgcgtgacagccggatttccaccgaggaagccgaggcgcaaaccttggcgtttctcgaacaatgggtgcccaagggcaagtcgccgatctgcggcaacagcatctgccaggatcggcgtttcctgtaccggcgtatgccgcgactggaggcctatttccactatcgcaacctggacgtctcgacgctcaaggaacttgccgcgcgctgggctccggacgtgctggccggcttcaagaagggcgggacgcatctggcgctggacgacatccgtgagtcgatcgccgagctgcgtcactaccgcgagcatttcatcaaaagctgaaaagacgaaaaacacgctgaaggctgagggctggacgagcggcaattgacttgccaggaaggagcttgccggcttcgctgcccagcctccagcctccagcctccagcctccagcctatttccccagtcgccgcaactcgtccgactcgaccagccgaatcccatcaccttcctccagcgccaggcgccagagtgcgcgcgccagcgtgcaggccgaaatgccccggtacttgccaggcagcaggtaggagagcggggcggtcaatcgctccaccggacgtacttccatgcgcggccccagcagctgcgacgggcgtgcgatggtcagttgtggccagtcctgggcgcgcaaggcttcttccatttcgcccttgacccggcagtagaagatcgagctgtccgggctcgcgcccagggaactgatcaccagaaggtgtcgtgcgcccagttcgcgcgcgcgcctggcgaattcgacgaccagatcgagatcgatggcgcggaacgcgtcctggctcccagcctctttaagcgtgctgccgagacagcagaacgccgtgtccatctggcctgacagctgcggcagcaggggccgtagcgggccgatcggattttccagcctcggatgctcggccaggggtttgcgggttggcgcgaggacgcactcgaccgtaggttcgttgagcaggcggtcgagcaggtgctcgccggtcagtccggtggcgccggcaagcaaaatgcgctggggcgtcaaatacatggtttggcttcctgtgacgattcagtcggtcggcgcgggctgtggttcgttcagcactcgccagtgttcgacaacctgctgcggcgcccagatctgcggctccgaagcctgatagtggtcggcttgctcccgttcggcaaccctcgcctgtgccagcgtgaacgcttgcacgatatcgcgggtttgctgcaacgcttcggcgaacagggcgcggccgaagtaggtgaagtcgctctcctcggagcagccgaacgacacgcggtcagcgcgcgcggcggtaatcactagggtattggggctcttcagcggctcgatgaagcctccggagtaacaggctgagatcaccaccaccttgtcgcgttcggcaagcggttgcagcagggtcgccaggtccgttgccggaaggtcttccagggccatgcggggctgcgccagcaccagctgatgatcggccgagccgtggctggtcaggtagatgaaaatcagatcctcggcgccactgcgttcggccagcgtacggacagcgcgcgcgatcgtctcgcgggtcgccagcggccgctcggtgagctggtcgcgatggttgaccagggtgatctggccgcgcgcggcgaaacgttctgccagcaatgcatcgacataatccacctcgcgcatgaacacgctctggcgcccgtcgccggcgacggtgaggctgtagagttctgccgccgcggtcgaggctggcaccgcctcgagcatgtccgcaagcagcggcccctggcgcaacaggccgatttccagcggatcgggcagacgtttgccggtggcgtcatggctcaggcgaccggcgcgccaggtgccgcgctgttcggtgccgtcggccagcgtgagcgtgcccggcccgtgaaaccgcccggcgtggaactggccctggtagcggctgccgtccggctgttgcagttgcccttcgccctgatactgccaatgctcgaacgcgcccttgtagcgggatccgtcgatgccgacgtactcgcccgggccgctcagctcgccgtgctcgaagcctccggtccagacgttgccgtcggcgtcttcatagcggccctggccgtggaacaggtcattctcgaagcgcccgatgtagtgatcgccgccattgccccggtaggcaccttcgccgttcagctggccatcgacgaaggtgccgctgtattcaccgtcggcgtcgctgcggctgccttcgccattgggctggccgtcggcgaacgcgccctgataggtcgtgccgtcgtgctgcagcttgccttggccgtggtagagaccgtccctgaagttgccttcgtagctcaagcccgcttcggtatagcgaccttcgccgttgaggctgccgccgcggaactgaccttcgtagacgccgccggtggcgtagctgaaccgcccctggccctcgaacaggccctgtctgaactcgccttcgtagcgatcgccgttggcgccttgccagctgccctgggcatgccactggccgtccttgaatccgccgcggtaaaggcttccgttggggtagtcgattcgtccctggccttgcaggcgcccgtcgacgatctcgccgcggtagcgccctccatccggtagcaccgcgtcgggcggtagcaagggctcgccatcgccgcaggcgaccagcaggcaagcgaacagaagcggggtgaagcggcgcatgcggctatccagagagaggaggccggcagtatgccgcaaacggggccgggtgcgacaacggcgcaccccgtgaggtcagacgacgcagagcgccagggtttcggcaatgtaggccggtttttccacgccttcgatttccatgacggcgcgggccttgagcagccattgccccggattcttctcgtaggcatcaagcagtgtcgcggctacacggacccgcgatccgactctcaccggctggatgaaacgcaggctgtcgagaccatagttgacccccatcttggtgccttcgggccggaccatcaggtcctccatcagcaggggcagcagcgagagggacaggtagccatgggcgatggtgccgccaaacggcgtctgggcggctttctccgggtcgacatgaatgaactgatggtcgccggtgcattcggcaaactggtcgacacgctgttgatcgacggtgagccagtcggagtgaccgagcgccttgccaatgtagttcttgagttctgtgacgggtacctgcggcatatgacctccggacgtttgttgttatgtcggtgcagcgtctgagggttagatcagcatgggcccgcggatcgatcaagcacgcatggtcgtgcgaatggtggaccataggtcaggcccgtgccggcccccgccgggtggcggcgactggcttataatgtcgattccctcactcaggagacatccatgctgctacgcggcctaacctggctggtgctgttccaactgctcggcactgcactcaacgcgttgatcctgccggtgctgccggggccgattatcgggctggtgctgctgttcgtggcgctgctgatgcgtggccaggccagtgaatcgctgcaactggctgccagcagcctgttgcgttacctgccgctgttgctggtgccaccagctgtgggcgtgatggcctataccgaggcgattctcgacgacttctgggccatcgtcggcgtgctggtgctgtcgttggtggtctcgctggtgttcaccggttggctgatgcagacgctgatccgccgccagcagcgtcgggcgggccgagcatgatcggcgggcagtggcaggcagcctgggatgcggtgattcatcacccgctgttcggcgtagccattacgctggcgacgttccagttggcttatgccgcctatgagaagactcgctgggtgtttctgcagccggtgctggtgtcgatgctgatggtcgtcggcatcctgctggcctgcggcctgacctaccagcaataccgtgacagcgcgcagatgctcaccgtcctgctcggaccggccaccgtggcgctggcggtcccgctgtatctgaatctgcgccgaatccgcgagttgttcggtccgatcatggtgaccctgttgctggcgggtaccgctgcgactgcgctcggcatggccctggcctgggcctttggcgccgaccaggtgattctgatgaccctggcgccgaaatcggtgacctcaccgatcgccatgctggtagctgagcagatcggtggagtggtcgcgctggccgcggtgttcgtgatgatcaccggcatcatcggtgcgatcgtcggtccggaactgttacgtcgctttggcgttcagcatcctgcggcccgcggcatggcgttgggcctgaccgcccatgcggtgggtaccgcgcaagcactgcaggaaagcgaggagtgcggtgccttcgcggcgctggcgatgagcctgatgggcgtgatgaccgccgtgctgctgccgctggcggtgttgctgttgtcctgaggagttgctatgaagctgccgttgtttccgctcgataccgtgttgtttcccggttgcaccctcgatctgcagatcttcgaggcgcgttatctggatatggtcagcagctgtctgaaagccggtcatggcttcggtgtggtccgcctcatagagggcagcgaggtgggcctggcggcgagcgagtacgcttcgaccggttgcgaggcgctgattcgcgactggcagcagcgtcccaacggcttgctgggcatccgcgtcgaaggcgggcgtcgcttcgatgtgcagtcggccgaggtgcagcgtgatcaactgaccgtcgccgagatcagctggcgcgacgaaggcgacgatctgcccctgggtgacgagcacgctgacctggcgattctgctcgaggccctgggccagcacccactggtcgaaaccctgggcatgggcggtgccgtgcaggggcagcgttccctggcgtaccagctggcctatctgttgccctttcagccggaacagaagatcgagctgttgcagttggacgatgcgccgctgcaactgcagcggatccagcattggctggagcagttgcagggcgatgcggtcgacggcgacgacgtctagcgggcgctgctggccgtaggctactgatagcgatacagcagcatggcgcctggcaatgcccagatcgagaacgcgccgatcaggcccagggccgcaggcaggatcagccaccacaccttgggcgagagtgcattcatcggggcgcgccattgcacgagggtaaggctcgcggcgcagatggtcgcggccagcaccgcgccggcgatcacatcggtcggccagtgcaccccgaggtagatgcgggataacgcgatggcggttgccggcagtcctgcaagcagcacccaggccagacgcaggcgtggcggctggccgcgccccgcaaggaccccgagggtaagaaagaatgcgaacgccgccgagctgtgcccgctggggaaactgaagctttgcaggggctcgagaaggatttccggacggacccgcccgaacgtcgctttcagcgcgccgttggccagtgccgtacccagtagcgtgaggatggcgaacgtcgccgctcgccattgtttcaccacgagcagcagcacgctcaacagtactgcggcccacagctgggtatggaaatccccagcccgcgtgaccacgaccacgaagcgatcgaatatcgggctgcgctcgccctggaccaccgtcatcaggccttggtcgaactccaccagatagggccagccgatgaacaggccgatcagtgtggcggcgctgagtgctgctgcgtacggtgtgacccagcgcatctgatgcaggctgcagtgcaccacgccgccgatcagcagcaacagtaccgcgatcaccacgcccgcctccggccagaaatcgtcgggcagcggcaatcgcacggccgcgccggctgtccagcccggcaacagataagccatggcccagccggctgcggcgaccaggctgaccagcaggaagcgtccgaatggcatgtcgagcatgccggcggtgaggggaagcatggggcgcagcgggccgatgaagcgccccaccagcaggctggcgatgccgtagcgctcgaagtacagctcggcgcgggtcagccactgcgggttgtcacgcaggccccgcatattacgaatgctctggtgatagcggcgtcccagtccgtaggacagcaggtcgcccagcaggccaccggcgtaacccagcagcagggtctcgccgaggctcagcacgccactgccggcgagcacagcgataccgaatatgaggacggtgccgggcatcagcaggcccaccaccgcgagacactccaggcaggccaccagaaacaggctcaagcccagccattgtggattgtcagcgagccagccggtgagtgtggtgagccattcgggcatggacgtttccttgaggcgagagggtttcgacctggcagctggcgctccggtttcaagtgccgggcatgattctgccaatgttgatggcgcccccgacggcttcagcttgcggtgagcggttgtcgggcgcgcgacggctcgggcggatcaggctacggcacgccacgcttttcagccattcgcccgacgccgctgtgcgccggacgcatgggtggctataatcagccgctttctctccagtcaggccagccagaccatgaccgagtccgtactcgactacatgacccgcctcggtcgcgccgctcgcgaggcgtcgcgggtgcttgcgcgcgccaccaccgcgcagaagaatcgagccctgcatgccgcggccgctgcgctcgatgccgcgcgcgaggaattggtagcagccaaccagcaagacctcgccgctgggcgcgccaacggcctggacgaggccatgctcgaccggctggcgctgacgccggcgcgtatcgacgacatgatcgaggggttgcgccaggttgcgaccttgcccgatccgattggtgaaatccgcgacatgcgctatctgccctccggcattcaggtgggcaagatgcgcgtgccgctgggcgtggtcggcatcatctacgagtcgcggccgaacgtgaccatcgatgccgccagcctctgcttgaagtctggcaacgcgaccattctgcgcggcggctcggaagcgattcattcgaaccaggcgattgcccgctgcatccagctggggctggccgaagccgagctgccggccgcagcggtgcaggtcgtcgagaccaccgatcgtgctgccgtcggcgcgttgatcaccatgccggactatgtcgatgtcatagtgccgcgcggcggcaagggcctgatcgaacgcatcagccgcgatgccaaggtcccggtgatcaagcatctggacggcatctgccatgtctacgtcgaccaggccgccgatctcgacaaggccattcgtgtggccgacaacgccaagacccagcgctacgcgccgtgcaataccatggaaacgctgctggtgcatgcggccatcgcagcgcgcgtattgccgccgcttgcggccatctaccacgaaaagggcgtcgagctgcgtggctgcccgcgcacctgcgagctgctcggcgaagcggtgcatgcggccagcgaagaggactggtccaccgagtacaacgcgccgatcctgtcgatccgagtggtcgattcgctcgaccaggcgatcgaacatatcaaccgctacgggtctcagcacaccgacgccatcatcacggaaaacttcaccgacgcccggcgcttcatcaccgaagtggattccgcgtcggtgatggtcaatgcctccacccgtttcgccgatggcttcgaatacggcctgggcgccgagatcggcatctccaccgataagctgcatgcgcgtgggccggtggggctggaagggctgaccagcgagaagtatgtagtcttcggcgacggccatgtgcgtacttgatgggcgttaatcaacggccacggcgcatcggcgttctcggcggtaccttcgacccggtgcatatcgggcacctccgcggggcgctggaagtggccgagacgctcggcctcgacgaagtgcggctcgttcccaactttcgcccgccgcaccgcgaggcgccgaacagctccgctcaggatcgtctggccatggttcggctggcggtgcaggacgtgccgccgctcgcggtcgatgcgcgcgagctggagcgcgacaggccttcgtacacactcgacacgctggagtcgttgcgtgaagagctggatcagcaggatcagatccatctcatcgtcggctgggatgccttttgcgggctgcccagctggcatcgctgggaagaactgctcgatcactgtcacatcctggtcatgcagcggccggatgccgatagcgacgcgccgcaagccttgcgcgacctgctggcggcgcgcagcgtcaacgacccgctggcgctttctggccgcagcggacaaatcgctttcgtctggcaggcgccgctcgaggtgtcagcgacacgaattcgtcaatttctggccagcggccgatcggtccgttttctcgtacccgacgccgtactggcttatatcaacgcgcacggactttaccgggcgtcgaactgaggttgtttcaagttatgcagaatgattctttggtccagctggccgtcagcgccctggaagacctgaaaggcgccgacatcaccaccatcgatgtgcgcggcaagaccagcgtcaccgatttcatggtgatcgccagcggtacctccagccgtcacgtcaagtcgttggccgacaacgtgctggaaaaggtcaaggagcagggcgtgcggccgttgggcagcgaaggcctggacggcggcgagtgggcgctgctcgacctgggcgatgtggtggtgcatgtcatgcaggtgccgactcgccagttctatgacctcgagcgtctctggcagggagcggagcagagccgcgcgcagcacgccggcgagcaggaataaacacccgtgcggatcaagctggtggcggtggggtcgaagatgccgcgctgggtcgaggacggttggcacgagtatgccaagcgcctgccgtccgagctgccactggagctgcacgagatcccgctcaacacacgcggcaagaatgccgatgtgacgcggctgatacgccaggaaggcgaggccatgctggcgaaggtgcaaccgggcgaacgaatcgtcactctggaagtgaccgggcgaccttggagcaccgaacaactggccgccgagctggaacgctggcgcctcgatgcgcgcaacgtgaatctgatggtcggaggtccggaaggattggctcccgaagtctgcgcgcgcagtgagcagcgctggtcgctgtcacccctgaccttgcctcatccgctggtgcgcatcctcatcggcgagcagatctatcgcgcctggtcgttgctgtcgggccatccttaccacaagtagtccagccaagcccaagatgtcacagcccatcccgctcaaggatcacgaaaaggacgcccgcctggtgcgtcagcgcgtgctcgtgggtgccgtgatggtggtgctgttgatcggggtcttgattgcgcgcctgtattacttgcaggtcatccagtaccagtaccactccacgctctcggaaaacaaccgggtccatgtccagccgattccgcccaaccgggggctgatcttcgatcggaccggcaagatcattgccgacaaccgcccgagcttcagcttgacggtcacccgtgagcgcgccgaggactggcgcaagacactggacaccgtggtcgaggtgctggggttgtcgagcgaggagcgggagctgttcgagaagcgcgtgctgcaagggcgccggccgttcgagccggtacccatcatgtacgagctgtccgaggagcagatcgcccgcatcgccgttgaccagttccgcctgcctggcgtcgaggtcgcggcgcagctggtccggcattatccgcagggcgaacacttcgcgcactcggtcggttacgtcgggcgtatcaacgaggcggaggtcaagcagctcgatccggtcaactacagcggcacgcatcatatcggcaagaccggtatcgagcgcttctacgaagaggagctgcacggtcaggtgggctacgaggaggtcgagaccaatgcgcgtggccgagtgctgcgggtgctgaagcggaccgatccgatccccggcaaggacatcaccctgaccctggatctggatctgcaaaaggcggcggaagccgcgctggcggggcgtagaggggcggtcgtggcgctgcagccggcgaccggcgaggtgctggcgatggtcagtcaaccgagcttcgatccgaatctgttcgtgacgggcatcagtttcaaggcgtacggcgagcttcgcgattcgatcgaccggccgctgttcaaccgggtgttgcgcgggctgtatccgcccggctcgacgatcaaaccgatgatggcagtggccggtctcgataccggcgtcgtcaccgaggacacgcgggtattcgatcccggctttttccagctgccgaacgtcaagcacaaataccgcaactggaaccgtggtggcgatggttgggtgaacctggagactgccatcatgcgctccaacgacacctatttttacgagctggcacacaagatgggcatcgaccgcatgtacgactacatgagtcgtttcggcatcggacagcgcgtggcgttggacatgttcgaggagaccgccgggctgatgccgtcgcgcgattggaagcgtgcccgttaccgtcaaccctggtatccgggcgaaaccgtcattctcggcatcggccagggctatatgcaggccacaccgctgcagctggcacaggccacggcgttgatggcgacccatggcaagtggatccggccgcatctggcgaaaagcctcgagggccaggctccggtcgatccggagccggtgccggatatcgagctgcgcgatccacgctactggaaggccgcgatcaatggcatggagcaggttctgcacggcgcgcgcggtacggcgagaaaggtcggcgacacgatgaaataccgcggcgccggcaagagcggtaccgcccaggtggtcgcgatcaagcagggtgagcgctacgacagcggcaagcttgccgagcgccatcgcgaccacgcgctgttcgtcgcgttcgcaccggtggacaatccgcaaatcgcggtggcggtcatggtcgagaacggtgagtccggttccggtgtcgccgcgccagtggccaagcaggtcatggacgcctggctgctcgatgaaaacggcgaactgaaggccgagtatgcgaaaccgccgaccgccgaggtggccaagcaatgagcgggacattcgatcgtaccctgtcgaccaccgacgtgatgcgccggcgcgcgaccttgctgcagcgcatgcacatcgatggggtgctgctgttgctgttgctgctgctggccgccggcagcctgttcgtgctctattcagccggcggcaagagctgggatctgctgctcaagcaggcggcttcgtacggcatcggcctcggcgccatgttggtgatcgctcagctggagccgcgattcatggcgcgctgggtgccgctggggtatctcttggtcgtggcgctgttggtggcggtggatttcattggttacaccgccatgggcgcgacccgctggatcagcattccgggggtgattcgctttcaaccttcggaattcatgaagatcatcatgccgatgaccatcgcctggtatctgtccgcccgggcgttgccaccgggcatcaagcacacgatggtcagcctgggcctgatcctgacgccattcgtgctgattctcaaacagccggacctgggcacctcgatgctggtgctggtctccggcgccttcgtactgttcatggccgggctgcggtggcgctggatactgggtgccgtcgcggctctcgtgcccgtcgccgtgggcatgtggtatttcgttctgcacaactaccagaagcagcgtgtgcatacctttctcgatccggagagcgatccactggggaccggctggaacatcatccagtccaaggcggcgatcggttccggtggcgtgtttggcaagggctggctgatgggtacccagtcgcacctggattttttgccggaaagccatacggactttatcattgcggtcctcgctgaagagttcggcctggtcggcgtctgcttgctgctgttcgtatactcgttgctgatcgcgcgcgggttggtgatcaccgcccaggcgcaaacgctgttcggcaagctgcttgccggcgcgcttacgatgacgttcttcgtctatgtattcatcaacatcggtatggtcagcgggttgcttccgatcgtgggggtgccgttgcccttcatcagtttcggtggcacttcattggtgaccctgctatcagggttcggggttttgatgtcgattcacacccatcgcaagtggatcgcacaggtttgattagagtgaatttcttgaatccattacggcgtggctggttggcacgggtgctttgcggagcgggtctgttcagtgggttcggctgcgcctccgtggcgattgcggcggactatgaaggcgagaaggttgccgagttcgttcgtgaaatgacccaggattacggattcgccggtgagcagctggtggaaatgctggcccaggcagaacgcaagcaggccattctcgacgcgatctcgcggccggccgagcgcgtgaagccctggaaagagtaccggccgatcttcatcaccgattcacgcatcgcgcagggcgtcgacttctggcgggaaaacgaagcagcgctggcgcgggccgagcaagtctatggcgtgccggccgaaatcatcgtcgcgatcatcggcgtcgaaaccttttacgggcgcaataccggcaattatcgcgtcatcgatgcgctgtccacgctgagtttcgattacccaccacgccaacccttcttccgccagcagctcaaggagttcctgttgttggcgcgtgaagagcaggtagacccgctcaccttgaccggctcgtatgccggtgcgatgggcttgccgcaattcatgccgagcagttttcgcgcgtatgccgtggacttcgatgacgatggccatatcgacatctggaaaaaccccgtcgacgccatcggcagcgccgccaattacttcaaacagcacggctgggtggccggcgagccggtggtcgcccgcgccaatgtcgagggcgagcggcacggcgaaggtctgaccgagggcctcgagccggtcctgagtgcggccgagttgcgtgagctgggctggcagtggcggaccgacaaggctatcgccgatgacaccgccgtgacggctttccgcctggatggcgccgacggcgacgagtattgggtcggcttgccgaatttctatgtcatcacgcgctacaaccggagcgtgatgtacgccatggcggtgcagcagctcgccgaacggctggcgcgcgcgcgaggtgatcaatgaccgctcgtttgctggcgacggccctcgccgttgccctcctggccggttgttcgtcgccgacgccacgctcctcggggccggcgacgactgccggagttggcagcgccggtgactatgctcgcccgcacaaggacggcgcgccctggtgggacgtggatgtctcgcgtattccggatgcgacaccgatgccgcataacggcccgttcaaggccaatccttacacggtgctgggcaagacctactatccgatcggcgatgggcgtaactatcgcgcgaccgggacggcgtcgtggtacggcaccaagttccatggccagcctaccgccaacggcgagaaatacgacctgtatggcatgagcgccgcacacaagacactgccgttgcccagctacgtgcgggtgaccaatctcgacaacggcaagaccgtggtgttgcgggtcaatgaccgcggccccttctattccgatcggatcattgacctgtcgttcgccgcggcgaaaaagctgggttacgccgaagtcggtacggcgcgggtcaaggtcgaaggcatcgaccccgagcagtggtgggccgaacgcgggcagccggtacccatggtgctggcgcagtcgcaagcccccagcaaggttgccgggccttcgctggcgcagcccgtcgaacaatacacgccgccgccggcacagcacgccggcgccacgttgccggtgcaggtcgacaaaggcgacaaagcgaccgctgcggccaagccaggcgtgttcctgcaggtcggtgcgttcgccaacccggacgcggcccagctgttgcgtgacaagctcagcagcatgactgccgcgcccgtgttcgtcagttccgtggtgcatcaggagcagattctgcatcgagtgcgcctggggccgatccactccgcggatgaagccgcgcagctcgagcaaagcgttcgtctcgccaacctgggagatcccaggcgggtgcggggtgattagccccgctccggtgctcgaataaaacatggcgcgcttattcaacaaccctttggcacatcaatctttctgagagagcaatgactatcaccaccttcgtgcatcgactgttcctcctcaccgtgctggtcgtcgcgccggtagcctgggccgagccagtcattccatcgccaccgcaactggcggcgaaatcctacgttctgatggacgcggccagtggcaaggtactggtcgagaacgcgggagacgagcgcctgcccccggccagcctgacgaagctgatgacggcctatatcgccacgctggaaatcaagaagggccagatttccgagagcgacatggtcacggtcagcgaaaaggcctggcgtaccggtggctcgcggatgttcatccaggtcaacacgcaggtatcggtcgacgatctgctgcacggcatcatcatccagtccggcaacgacgccagcgttgccatggccgagcacattgccggcagcgaggaagccttcgctgatctgatgaacagcacggcccagcggctgggcatgagcaactcgcacttcatgaacgccaccgggcttccgaaccccgagcattactcttcggcaggcgacatggccaagctggcccgcgcgatcatccacgaggacgcggcgcattacagcatctacgcgcagaaggaattcttctggaacaacatcaagcagcccaaccgcaacctgctgctgtggcgggacaagaccgtcgacgggctcaagaccgggcatacagaggaggcgggatactgcctggtcgcctccgcggtgcgtgatggcatgcgcctgatcagcgtggtgttcggcaccaacagcgagcaggcccgtgcggccgagacgcagaagctgctgacctacgggttccgtttcttcgagaccaagaccttctatcagaagggcgtcgagctggccaagtcccgcgtctggaaaggccaaaaggatcagatcagcgcgggtctgcaggacgacctgaccctgaccctgccgcgcggacagctggacaagctacaggctggcctgaccttcaaccccgaactcacggccccgatccagcagggcgacgtgatcggtcgagtcgacgtcacgctcgatggccaagtgctgcagagcaccgatctgatcgccctcgaaaccgtggaagagggtgggctgttcagccgactctgggatagcatccagctgttcttcttcaaccttttcaactgatgcctcttgagcgcgcccggttatccgccgggcgtgcttgcggatcacgagtccgttacccatgaccgaacgtaaaactgatgcagcaccaccgaaaatcgaatttccctgcgagcgttacccgatcaaggtgatcggggatgccggcgaggatttcagcgcgacggtggtgaaggtgattcggcggcatgcgccggacttcgacgaaaccacattggtcgcacgcgacagccgcaacgggcgcttcctgtccgtacaggtgctgatcactgcgaccagcgtcgagcagctgcaggcgatccatgtcgatctacgcgcgaccggccgcgtgcacatggtgctctgatgtctggctgcccgtatcggcctcagctgatcgaaaccgggattcggcaatgaacgccactaccctcggggtgcgtgagctcggcctgttggaataccagcccgcctggcaggcgatgcagcgtttcaccaacgagcgcgggccggccaccggcgacgagatctggctgttgcagcatcctccggtattcacccagggtcaggccggcaagcccgaacatttgttattgcccggcgatattccggtggtacaggctgatcggggtgggcaggtcacctatcatggcccggggcagttggtgtgctacctgctgttggacgttcggcgactgggcatcggtgtccgcgaactggtcagccgcatcgagcaaagcctcatcgatttgctcgccagctacgacgtacaggccaactccaagcccgacgcgccgggggtctatgtcgatggggcgaagatcgcatcgctcggtctgcgcatccgtaacgggcgctcgttccacggtctggcgctcaatgtggacatggacctggagcccttcgggcggatcaacccttgcggctacgccgggatgagcatgacccagttggcggatctggtcgcggggccagtcgccttttccgaggtcagtgcccgcctgcgcgagcaactggtcaagcacctcgggtacgcgcagcagcagactctgacgggcgcaatagagcactaggccgagcgcgagttcgttccgtgtgagtggctagcggaaatgaaaacgcccgccccagacggcgtctggggcgggcgcagttcgacccgatcagttcaggttgagggtcggaatcaggctgctgtcgaacgactggcccggtaccggcaccggcgcggccaggcccaggttgttcttttcgaacacccggtcggctcggtagctggagcgcaccagcgggccagcggccacttccataaagcccttttccaggccgatatcgcggaaacggttgaattcttccgggctgacccagcgcttgaccggcagatggttgcgggtcggctgcaaatactggccgagggtgaggatgtccacgccgatggcgcgcaggtcatccatggtctgcagaatttcttcatcggtctcgcccaggccgagcatcaggctggtcttggtgagtacttccgggcggtgtttcttggcgtgctcgagcaccttgagcgtcttctcgtagcccgcacgtgggtcgcgtacttcgcgggtcagacgcttgaccgtctcgacgttctgcgcgaacacctccaggccggaatcgaccacgcgttcgatggcctggtgatcaccgtcgaaatccggcgtgagcgcctcgaccaccacctgcggcgtgttgtccttgatggcccgtacgcaggctgcgtaatggctggcaccgccatcttccaggtcgtcgcgatccaccgaggtcagcacgatgtagcgcagcgccatcagctccaccgacttggcggtgttctgtggctcttccagatccagccagccgttgggattgccggtatccaccgcacagaagcggcaggcgcgcgtgcacaccgatcccatcagcatgatggtggcggtgccgttggaccagcattcacccatgttcgggcaatgagattcctggcacacggtgctcagacggtgctcaccgacgttgcgcttgaccgcttcgaagcggctgccgctgggagccttgacccgtagccacttgggcttgggttcgaacacctggggctcgctcgaggcccggcgcttctgcccgtccttgatcgcggtaatgccctgggtggtgcggaatttttcgccgctggcaacggttttgggctgggagatttcggacatcggctttctgggctccgctagaggctccgggggacgaggcggctcgtggccgccgggcagtttatcacaggcactgactgcacggtccgtctggcgaggcgccagtcggttgcccaggctgctgcggcaggcgctgtgcaggtagtgatgcttgggtttcacgcggccgaaccaattggcgcatcaggtgcgccagcgacactgccggcgagggcgagcgtgacctgttggagagagcggctcggggccgagcagggccgattagttcggcgctgctcggctatggctctgcgcgcaagcggcccagcaattcctgcgttggatggccatcggcgggccagccgagctgctgttggaagctgcggatggcgttgcgggtgttggcgccgatgatgccatctgcggcgcccggatcgaagccctggttcgacaggcgctcctgcagctcgacgcgctcggagcggctcaggggctgctcgccctgcggccagctcgcccggacccagccggcaccgtcgaaacgctcggagagcaggccgatcgccagtccgtacgatgacgagttgttgtaacgcagaatggccctgaagttgtcgagaaccaggaaggcgggcccgcggtagccggcgggcagcaacaggctggcgctcgcttcgtccatggtcgcgggcaggctgcgtagacccaggcggcgccactcggacaacggcttgcgaatggcgctatcagccagtgcatagtcgaagccatccggcaggctgacttcgaagccccagggttgtccggctttccagcccgacgcttgcagatagtgagcggcagaggccagcgcgtcggccgaactgttccagatatcccgccggccatcgccgtcgaaatccactgcgtgggtgttgtaggtggtgggaatgaactgggtctgccccatggcgccggcccaggagccacgcaactgctcggcggtgacatcgccgtgctcaaggatctgcagtgccgccagcagctggctcttggcgaagtcgggacgccgcccttcatgcgcgagagtggcgagcgaacgaatcacgcccttgtcgcccatgatctgcccaaagctgctctccagcccccagatagctaccagagtgttccgatcgacgccgtagcgcgcttcgatgccatccagggtctgctggtgttggcgcagcaggcgcttgccgccctcgactcgctgctgcgacagggcgccttccaggtattgccataccgggcgggtgaattcgggttggctgcggtcggcgacgatgatgctcgggtcgggggtaacgccggcgaaggcgcgatcgaacaccgacgccggtatgccggcttgcagggcttccctgcggaaggtttcgcgccattcggcgaagcttaccgtcgctgactcggcttcggctggccctgccggatccggttggggcgtggccggcagctgagcggtagccgtggcagtgaccggtgcattgggttcggcggcgcaggcgaccacgatgcacagcgccgaaccggcaatcaggctacgcaacagcagaacgggaacgaaggtgtaaagcatgcaccactctcggcaaggcatcgacggacgacattatcacgctttgccttgcttggcttttcaagctgccagaaggaccgaagcctcccagttggtggactgggaggcttcgcggcggtagctgcctttgccttttttcggctgttcctggcgactgcgaaatagcggttgcgccaccaggctcttggccttgttcggccgctttcgttgcttgctcatgatctttcctccaggttgctctgatcaggccgaggcatcataaggcttgtgcaaaaattgtccagccgacctggcgctgaccgccatcgcgtctgagagtggtgcagtttgattatccggtgcgcccggcacgccgaacgctagaccttgagtctgcgcccgctcaattgcaggcaaaggtccgtcaggcccagccaggggtcaccctcggcttgccccttgatctgctcgtcaatgcgctgcgcatccatcagcaggcgttgccagcccgctacgtcgtggcgctgcagcgccttgctgaccagcggcttgcgcttgtcccagaccggcgggcgggcctggctgaaggctcgatcgagcggcacgccctggctgtactgctgtgcgatgttggccaactggcgaatctcgcgcgccacggcccagagaatcaccggtgcctcgacgccttcgccgcgcagtccggccagcatttgcagaatgtgctccggctggccaagcagcgctgcgtcgatcaggccgaaaacgtcgtaacgggcactatcggcgacggcggcctgcacggtttcggtcgtgacctgaccgccatcggcaagcagcttgagcttttcgatttcctgcgcggcggcgagcaggttgccctcgacgcgcgcggcgatcagttctacggcttcctggtcggcggccagccctgcctgcgacaggcgttgacgaatccactgcggcaactgttgcgcgtccactggccagatctgcaggaactgcaccggtttgccgtctatcaacgccttggcccatttagtcttctgggtgctgccgtcgagcttgggcaggctgatcagcaaaacggtgtcttcggccgggcgtgcaaggtagtcgagcagtgcggcggcgcccttgtcgccgggtttgccattggggatgcgcaactccagcaggcgtttttcggcgaacaacgagaggctcgctcccgcttcgatgagctgcccccagtcgaagccggtctcgacattcagcacctggcgttcactgaaaccctgctgccggcaggctccgcggatggcgtcgcaggcttcctggcagagcaggtgttcatcaccgctgaccacgtatacgggcgcaagagggccttgcaggtgcttggcaagctgggcggggggcagtttcatgagttccgggaacggtagccaccggcggtggctaccgtttcatcactgaatcggcagttcgatcggggattgcagcggccgttggctctgttcgcgcatctgcgcctcgatggcctcggcttcggcgcgcttccgggcctcagccgtctgctgaagttggtcgagctgtgcgggggtgatgccgcggatgcgcatgctcacctgctgcagcaactcacggcgcatttcctgacgcagctgttcggcttcctggtcggagccgataaggttgctgctgtcatgcacgtagactttgcgcacttcgacgctgtcttccagcagtacggtgtcctgcgggccacggaactggtagtcgagcacgctggacagttcgtattcggcggtacgcgccgcagtcgtgtagctggcggtgcgctgtcgattctgttcgcggaccagatccagggtgtagcgtgcgcccgggtagacgcgtacgccgttgtccttgaggagctcttccagatccttggccgtgtcgccgtagctgttgcgtgcctgcaggttgatctcctcgagggcgaaactggtttcacccgtcccgcgcagctgaaaaccgcaggcgctcaacagcagggccaggccggccaccgcgagattgcgtttgatcatcttgttatccccttgccagccttggcgcgctgcgccaaggcgaatcagttagcgacgatattgaccagcttgcccggcaccacgatgaccttgcggatcgtcaggccttcggtaaagcgcacaacattctcgttggcgcgggcgctggcttcgatgtcttcacggctggcgctggcgggcacttcgatctgcccgcgcagtttgccgttgacctgcactaccagggtcaggctgtcctgcaccagggcggactcgtcgaccttcggccattgcgcgtcgatgatcgcaccgctcttgcccaactgctgccagagttcgtggcagatgtgcggcgtgatcggtgccagcagcagggcgacggtttccagcccttcctgcaacagcgcgcggtcctgttcggtctcggttgcggccttttccagcacgttcatcagggtcatcacctgggcgatggccgtgttgaatttgtgatgctgaccaacgtcgacgctggcctgcttgatggccagatgtatcgcgcggcgtaccgctttctgctcgtcgttcaggttggtagtgtccagctgacctgccgggccgtggctgacatgcacgtgggccagacgccagacgcgacgcaggaagcggttcgcaccctctacgccggaatcggaccattccaggctcatgtctggcggcgaggcgaacatcatgaacaggcggcaggtatcggcgccgtaggcgtcgatcatggcctgcgggtcgacgccgttgttcttcgacttggacatcttctcggtgccgccgatttccaccggcaggtcatcgctggcgagtttggcgccaatgaccttggccttggcgtcacgctcgacaatgacatcggccgggttgaaccagtccttgccgccgttttccagggtgcggtagtaggtctcggcgaccaccatgccctgggtcagcaggttcttgaacggctcgttggagctgaccaaaccttcgtcgcgcatcagcttatggaagaagcgtgcgtacagcaggtgcaggatcgcgtgctcgatcccgccgatgtactggtcgacgggaagccagtgattggctgcagccggatcgaccatgccctggtcgtaatgcggcgaggcatagcgagcgaaataccaggacgactcgacgaaggtgtccatggtgtcggtttcgcgcttggccggggcgccgcacttggggcagctgcactcataaaactccggcatgcgcgccagcggcgaaccggcgccgtccggcaccacgtcttcgggcaggaccaccggcagctgatcttccggcaccggcacatcgccgcagctgtcgcaatggatgatcgggatcgggcagccccaatagcgctggcggctgatgccccagtcgcgcaggcggaactgcgtgcgagcctgaccgaggcccttcttttgtagcgcgacttccatggcgtcgaaggcgccgtcgaagtccaggccatcgaatgcgcccgagttgatcagctcaccgtgctcaccataggcgtcctgccacggcgcgggcgtttcgtcaccggcgctggtgcgcaccacgggtttgataggcaggtcgtacttggtcgcaaaggcaaagtcgcgttcgtcatgggccggaacggccatcacagccccttcgccgtagttcatcagtacgtagttggcgacccagaccggcagcaactcgccggtcagtgggtgctgcacgcgcagggaagtggcgagacctttcttttcctgggtggcgatgtcggcttcggcgacgccgccacgcttgcattcttcgatgaaggcctgcagctcggagttatccgtcgcagcaagggtagccagtggatgttcggcggcgacggcgacgtaggtagcgcccatcagggtatcggggcgagtggtgaacaccttcatcacgccttcgctgccgatgctggcgacgtcgtaggggaagctgatctccatgccgcgcgacttgccgatccagttgcgctgcatggtcttgacctgctcgggccagccgtccagttcgtccaggctctccagcagctcatcggcgtaggcggtgatcttgaagtagtacatcgggatttcgcgcttctcgatcagcgcgccggaacgccagccgcggccatcgatgacctgctcattggccagcacggtctggtcgaccgggtcccagttgacggtgccgttcttgcggtagatcacgcccttctcgtacaggcgggtgaacagccactgctcccagcggtagtagtcgggcttgcaggtggtgacttcacgtgtccagtcgacggccaggcccaggcttttcagctggttgcgcatgtagtcgatgttttcgtacgtccatttcgccggtgcgaccttgttcttcatcgccgcgttctcggccggcatgccgaacgcgtcccagcccatgggctgcagcacgttcttgccctgcatgcgctggtagcgggcaatcacgtcgccgatggtgtagttgcgcacgtggcccatgtgcagcttgccgctggggtaggggaacatcgacaggcagtagaaggtgtccttgcctggctgctcgctcactacaaaggatttctgcgcgtcccaggaggactgcgcggcggcttcgatttcgcggggctgatactgttcgtgcatggctactggcgttgaatgatggctggctgctcgcgaagcggcgacgggctgcgcagatgccggtcgaaacctggcgaagtcggcggcacaacgggctggatgcgagagcatggaagcgccgtagcatacatgaccccccgcgaccgagggaaacctgatttgccggcgtacgcgcgccccgctggtcgcgggcctcgtcgtcgttcctgtgtgagctacgcttgtagctgggggcgggacgaccgaggaggtgaaccatgggtaaagagcgccaggcagatgagggcaacctatacgggcgcgtactgcagcggctgacggtggccctggaagaggcggagcgaaccgcgggcgatggttccggcacgacgaccgagctggaagtcggcgggctgacgccagcggagttcgatctgatccgcgcctatctgcagcaggattcgcaatggctgtcgggctggcacgcagcggccgaggaacaggcgcagctggtgcgccaggcgacgcgcccggccctgcgcaatgtactgcgccatcatcctcacccgggcaaacggagcaagcaggcgccgttgtcgctccagcaggcgatgagctgcgcgctctgtggcgccagtgtgagttggccggaaggtgccgggccggtcgcctgttcggcctgtggttcgcaactgctgcgtgcgaggcagcgattacatacctacccaaagcattgacggcgtcctctgccgacaagcggacgccctgacaggtaaagttgcagcgatcgatctaccggagctgcacatgccgattcgctatttcttcaaacaactgctgttgccgcccggcggcctgcttttgctgctgctcgccgcctggtggctgcggcgccgggcgccgcggctggccgcgctgtgcttcgtgctcggattcggtgggttgtggctgatgagcctgccggtcaccgtggaatgggccggacgggccctggaacgtgaggcgccgctcgatcgagccgagtgggccgacctcgcgcagcgtgcgcaggcgatcgtggtgttaggggcggggcgcgagcaggccgaccccggctggggatccgaccagcccagttaccttgcgctcgagcggctgcgcttcgcggcgcggttggccaaggcctcgggcctgccgatcctggccagtggcgggctgcactacggtcagccgccgagtgaggcgcagctggctgccgaggcgctacagcgcgacttctcgacaccgactcgctggctcgaggagcgcagccgcacgacctgggaaaacgcgctctacagcgccagcatgctcaaggatgccggcatcgatcggatcgtcctggtcacatcggcatcgcatatgccgaggtcgcgctggtgcttcgagcagaacggcttgcaggtgatcgtcgcgccgatgggctttgtcggagtgcccaacggccgtcctttcggtggctggctgccagaaaccaaagctgtctggcagaacgggctgctgctgaacgaggccctgggaatgctgatctatccgctgctctatggaggctccgccgactgagccgttgatcggacggtcgacgggcaggcggggctcaggccgagcggcgacggatcacgccccagccgagcagcaccagacatactgcgatcaggggccaggagcgccatcgcagatacggcgtcagaccctgcatgggggtgacttcgccgtagagcacctgctcttcgaacgccggtactcgctcggtgatgcgcccctgcgggtcgatcaatacggtgacgccgttgttggtcgcacggatcatccagcgtccggcctccagggcgcgcgtctgggccatttgcaggtgttgcagcggcccgatggaatggccgaaccaggcatcgttgctgactgtgagcagaatgtcgctttgcgccgcgaggctggcggcgaattcgggatagaccacctcatagcagatgaacggcgcgatccgatatcccttcgcctgcaacagcggttgctccggtgcgccccgggcgaagtcggacatcggcaggtcgaagaatgcgatcagcccgcgcagcaggtcctgcaagggtacgtactcgccgaagggcaccagcttctgtttcagataggtgccttgcgcatcgccggctgtcgtcaggccgttgtagtagcgcaactcgccctcggcgttcggctggcgcacgggcacaccggtgatcatcgccgagcgacgatcctgggcgaagcggcccatcatcgtcagatagccttcggcgtgctccttgaggatgggcacggcggtttcaggccagacgatgagatcgacggggcggctgcggaaggtcatgtcgcgatagagcagcagttgcatctcgagcttcttcgggtcccacttgatgctctgcgccacgttcccttgcatggccgcgaccgtgatcggctcggccttggctgtcgtccaggtgtgctggccgactcccaacgcgccgccccatagcgccaccagcagcaccagtgcgccgatcagcgcgcgtttgtctgcgagcaggcgaggcagctcggcgagtatggctgcactcagcacgatggcgaacgtcagcagccataccccgcccaccggtgccagtcccgccagcggaccgtcgagctggctgtagcccgcgtagagccagggaaatccggtcaggatccagccgcgcagcgcgtcgatcacgagccacaatgcagcgaacaccagcgcggcgagcagcggcccgccggcgggcctcagccagcgcgaccatagccagccgagcagggcgaagaacaacgccagaccggcgacgaaccccagcgtcagcgcgccggcgagcggcggcggtgcggcaccgaaatcgtgaatgctgacatagacccagctgacgcccgaggcgaacaggccgaagccatagcaccagccgcgaacagccgcctgtttcggcgccagctcacgcaggccgagatagagcagtccggccgacagcagggccagcggccagatgtcgaagggtgccagcgacagggtggtcagggcgccagcggcgagcgccagcaggttgcctggccagccggggcgggtgatccagcgcatggggtttccttgatgtggcgccgccgttcgatgcccggcggcgaggatgcggagcggaggagtctaccgaaggtttcggaacgccggcagggcgcctagccgttttccgttcgcgtgcgggtcaggcgcagcatatgcacgcggcggctgtcggcattcagcacgcggacgcggaaaccatcgatttcggtcacttcattgcgcttgggcagatgcccgaacgtgctcatgaccagcccggccacggtgtcgaattcttcgtcggggaattcactgccgaagaactcgttgaagctgtcgatcggtgtcagcgccttgaccaggaaatcgccgctgggcagcgggcggatatagctgtcttcctcgatgtcgtgctcgtcttcgatatcgccgacgatctgctccaggacgtcttcgatggtcaccaggcccgccacgccgccgtattcatcgatgacgatcgccatgtggctgtggttcgcgcggaactcgcgcagcagcacgttgaggcgcttggattcggggacgaaggtggccggccgcagcaggtccttgatgtcgaatgcctgctgctcgtcctgcaggatcaggggcagcagatccttggccagcaatacgccgatcacctcgtcgaggctgtcgccgaccacgggatagcgtgagtgcgccgcggagatgatcgctggcaagaattccttcggcgactgatcggcacggatgctcatcacctgcgagcgcggcaccatgatgtcgcgtacctgcaagtcggctacctgtatagcgccctcgacgatcgccagggcttcgttatccagcaatttgttctgatgggcgccgcgcaatacttccagcagctcctctcgggttttcggctcctgggcaaaagcctgggtgattttcccaaaccaggacttctgcccgttgctcgatcggtcttcgctcatgtctttgactcaatggtccttgcagttgcccgttcgggctattcggtggcgtaggggtcggggtgacccagctctgccagcagttgacgctcgaggctttccatttcttcggcttcctcgtcatcgatgtgatcgtagcccagcaggtgcagacagccatggatgaccaggtgcgcccaatgcgccgacagcgtcttgccttgttcggccgcttcgcgctcgaccaccggcacgcagatcaccaagtcgcccagcagcgggatgtccagcaattcgtccggtacgtcggcgggaaaggacagcacgttggtggcgtagtccttctgccgccaggtgcgattgagctcgcgaccttcgggctcgtccaccaggcggatggtcagctcggagtccgcggtgcgttggcgcagcgccagttcgcaccagcgccgaaggtccgcttcgtcaggcacagcggcgctgctggcgcattgcacgtcgagttcaatcaccttggctgtcccgcgcgctccgatggccggcgttgggcgctcggtcctcgaaggcctcgtaggcttcgacgatgcgctgcaccagcggatgacgcaccacgtccttgggcttgaaatgggtgaagctgatgccgttgacgtccttgagcacttcgatcacatgcgccagaccgctcttggtgccgcgcggcaggtcgacctgggtgatgtcgccggtgatcaccgccgtggagccgaagccgatgcgggtgaggaacatcttcatctgttccagcgtggtgttctggctctcgtcgaggatgatgaagctgttgttcagggttcgtccgcgcatgtaggccagcggtgcgatctcgatcacctgcttctcgatcagccgcgcgacgtgttcgaaaccgagcatttcgtagagggcgtcatagagcgggcgcaggtaggggtcgatcttctgtgccagatcgcccggcaggaagccgagtttttcgccggcctccactgccggacgcaccagcaggatgcgacggatctgttcgcgctccagtgcatcgacggcgcaggcgacggccaggtaggtcttgccggtaccggccgggccgataccgaagttgatgtcgttgtcgaggatcgactgcacataacgctgctggttggcgccgcgcgggcggatattgcccttgcgggtacgcagcgagacgttcggcgtggtggaggcattgttcagctcctccattgcggactcctgcaggaacaggtgcaccgtatccggcgacagctccgtgctcttggtctcgcgatagaggcggcgaaggaggtgttcggcggccttggtcacgtcgctcgggccgaccagttcgaactggttgccacgattacggatttccagctccaggcgctgttcgatcaggcgtaaatgctcgtcgaactgaccgcacaggttggcgaagcggttggcttcaaagggttccagggtgaaacgatgaggttctatgggggcgttcaagggattttgattgacctgctctgcaataagattcgatgagaatagcgccgcacggcgaaaaaagcagcggcgcgccggccctggcaatccatggcgacgcgcggctgacgtcctgcacggtggtcagccgcagcgcgcccctctcagctcgccgcttgctcgattagcgagccgcgcaaagagtgtggcagggcgtcgtcgatatgcacatcgacgaactggccgatcagccggggattgtcgcaacggaagttgacgatccggttgtgctcggtgcgtccctgaagcatgcctgggtctttcttagagtagtcggtgacgaggatgcgctgcacggtgcctgccatccgtcggctgttctcgaaaccctgctggttgatgcgttgctgcaggattgccagacgctgcttcttgacctcgtcgggtgtctcgtcgaccagatccgccgccggcgtgccggggcgtgcgctatagacgaaggagtaggagaagtcgaaaccgacatcctcgatcagcttcatggtctgttcgaagtccttctcggtttcgccggggaagccgacgatgaagtccgagctgatcagaatgtccggcaccgcggctttcagcttgcggatgcgcgacttgtactccagtgccgtgtggttgcgcttcatcgccgccagtatgcgatcggagcctgcctgtaccggcaggtggaggtacttcaccagttccggcacttcggcatgggcctggatcagcgcgtcggaaaattccagcgggtggctggtggtgtagcggatgcggtcgatgccgtcgactgccgccaccacgcggatcagttctgccagatcggcagtgcgcccgtcatgggtggcgccgcgatagccgttgacgttctggccgagcagcgtgacttcccgcacgccgttttcagccagatggatgacctcggcgagtacgtcgtcgaacggccggctgacctcttcaccacgggtgtagggcacgacgcagaaggtgcagtacttgctgcaaccttccatgaccgaaacgaaggccgtcgggccgtcgacgcgcggctcgggcaggcggtcgaacttttcgatctcggggaaggaaatgtcgacttgcggctttttcgtggtgcgcgccgcgtcgatcatttccggcagccggtgcagggtctgcgggccgaataccacatcgacgtagggggcccggtcgcggatcgccgcgccttcctggctcgccacgcaaccgccgacgccgatcaccagctgcgggttgtccagcttcagctcacgccagcgtcccagttgcgaaaacaccttctcctgcgctttttcacgaatcgagcaggtgttgagcaggatcacgtcggcttccgccgggttggaagtgatctcgagaggctgttgctcgcccaacaggtccaccatgcgcgagctgtcgtactcgttcatctggcagccatgggtttcgatatagagcttgcgggtcatgttacgggccggcgttgtgcaaaaaatgaccggcgattatacggccagcaggtggccgataaaagtgctgatcatgggggctggccggtagtctcggcgagcggagccggtgcggcgattagcgctacaagtcgtctcgccagtcgccagtcgccagtcgcgcgccgcgttcgttgactagcgacacgggcgcaggcagcgcgcggcgctacgggcggaaaggctcgttgccttccgcggtctgcaagtccatcaggtagtcgcgaaagatctgtccgagcacctgggtggcgatctccagctcgtcgcgacgcatctgtgccgagacgcggtcggcggtatccagcgcgtcttcctcaccattgaccgcagacatcttcagcacgacataggcctggacgttgttggctggcacgccttcgccgcggaagaacatcacgccgagccggtgctgagcctgcgcatgtccgtgcagcgatgcctgttcgaaccaatgcagcgccttgctcagatcgcgcggtgcgcgacggccgtcgtaataatattcgcccagctcaaaggccgcttgcagatcgccttcgctggccgcctgttcgcaggcgcgcaaggcttcgcgcatcgcttccggcacggtgttgagtgcgcagcgggaagtggccggaatcagcagcgagttgccgcctgcattggccagcaggggcgtgagtagcagcaggcagccaagggcgaggctgcggccggtgcgagtcatggatcaaagcgcctcgaagagcagggcggtgactgaaagtccggcaagaacgagccgacgttcacattatggataagccgccgcctgcttacaaaggctttgatggcgcacgcctggcaattatgcgggctcgcgaattccttcgcgaagattccccggcaaattgagcagcaaccaggcgatgagtgggcaggccagcgccagcaagagttgctcgtaggcactgagcgggttgggcccgatcgcgagtccgctccagggttgcagggccaacatcagcgcgccgccagccgcgccagcgctggcttgcaggcgtgcgggccactgcaacaggcctgcatagacaaccagcgatgcactgatcaggcccagcgcaagtgcgtagggtgcgctccagtcgaattggcgcgccagttcgaaaaaggcgcagaggccgatgacgatgcgcccccaggtcggtcgactccagatccatttacggcccagtgtcagcgccaccacgccgaccagcggtagcccaagcgacagcgtcgcctgccgcaaccaacgctcggcttcgagggtgtcgaggccgaacgccagcctggcgacggcgcaggcgcccgtgccggccgccaggctgaatgcgagcagggcgcagaacagggccggttggtccggttcgccatacccgcgccgtgccataccgatccagaccgcgctggtcagcgcagtggccgccagcaatgtggcttgcagcaactcggacatcaggctgccagttgggcgaacgcgcgctcggctgcgtccagggtcagttgcagctccttatcgccatgcgcgatggatgtgaagccggcttcgaacgcgctgggcgccaggtacacgccgccttcgagcatcaggtggaagaagcgcttgaagcgctcggcatcgctggccatgacgtcatcgaaggtgacgatgtcattcgcttcgctgaaatacagtccgaacatgccaccgacctgggtcgtgacgagcgggatgccggcggccttggcgcgcgccttgagcccgtcgagcatgcgcgtggtgtaggcagtgagctcgtcgtggaagcccggacggttgatcagtcgcagcgtggtcaggcccgcggccatggccagcgggttgcccgacagggtgcccgcctgatagaccgggcccagcggggcgatgcgctccatgatggcgcgcttgccaccgaaacagccgaccggcatgccgccgccgatgatcttgccgaaggtggtcaggtccggtgtcacgccgtaataggcttgagcgccgccgagtgccacgcggaaaccggtcatcacctcatcgaagatcaataccacgccatgcttgtcgcacaacgtgcgcaggccttgcagataacccggagccggtggcacacagttcatgttgccggcaaccggctcgacgatgatgcaggcgacttcgttgccgacttcgccgagcatctgctcgacggcggccaggtcgttgaacggcagggtcagggtgtgcttggcaaaggcagcggggacgccggccgaactcggcacgccctgagtcaatgcgccggagccggccttgaccagcaggctgtcggaatgcccgtggtagcagccttcgaacttgatgatgctgtcgcgaccggtatagccacgggccaggcgaatcgcgctcatggtggcctcggtaccggagctgaccatgcgcatcatctccatcgatggcaccaggctgcagaccagctcggccatctcggtttccatggcggtcggggcgccgtaggacaggccgtgctgaagctgacggcggaccgcgtcgagtacctcgggatggctgtggccgagaatcatcgggccccaggagccgacgtagtcgacgtagcgcttgtcgtcctcgtcggtgacgtaggcgccttcggcgtgcttgagaaagagtggggtgccgccaacgctccggaaggcgcggaccggtgagttgacgccgccgggaatgtggttttgtgcgctggcgaagagggtttcggaacgtgacatgcgggcctctcgattagaaatacaggagaacgggaatacaggttgggcgacgcgggcgggtcccgccatgacgtcggtcagtcgccgacgaacagctcgctgaatgcgcgtgcgcgacgctcgacctcgcggggcgattcggccgcgaacagcgcatgcaccacggccaccaggctggcgccgcgcgcgatcagatccggcgcgttgtccagcgtcacgccaccgatcacgacgatcggcaggctgaagcgctgacgcgcctgctcgagcatcgccggggtggccgctggcgcgccgggtttggtattggagtcgaagaaacgaccgaatgcgacatagctggcgccctgggcgacggcctcctcggccagctccagacgcgcgtggcaggtcgctccgatgatggcgcgacgacccagcagggcgcgggcggccgacagggaaccgtcgtcctgacccaggtgcaggccagcgcccagacgagccgccagctcggcgtcgtcgttgatgatcaactgggccccgtggcgctcgcagagatcgcgcagcgcttgagcttcacgcagacggcgcctgtcgtcgtcggatttgtcgcggtattgcagcaggcgtgcgccacctgccagtaccgcctcggcgtagggcagcaggcgaccatcggccagcagcttgctgtcggtgacggcgtagagcccgcgtagcttggcatctttcatcggcaacgctcctgtcaggccaggtccagcggtagccggcgtggaatgtactgcccgcgtcccggcgcctcggcatcgcgcagggtgcgccaggtgtagtcgagcgcggatttcacggcgctggcgaggccttcgccaagggccagtcggccagccagcgcactggccagggtgcagccggaaccgtgatagctgccgggcaggcgctggcagctgaaatcgtggcgatcgccgtcacgtgaatacagccggttgtggacttccgtctcgtcgccgtggccgccggtaatcaacaggtggcgtatgtaaggcagcagcttctgcgcgcactggtcggcgctgccctcgggcaggtccgcgagaatgcgcgcttccggcaggttcggcgtggcgatggtggaaaccggaaacagccgctcgcgcatggcgtatcccacttcatccttgcccagggcaccgccgccgccggcgcgtagcaccggatcacagaccagcgggacgcccggcagcttctgcatgatttgcaataccgtttcgaccatttccaccgagccgagcatgcccagcttgacggccgcgatcggcatgtcggcgatcacggcgtgggcctgggccagcacccaatcgcgatcgagcacacggaaatcgctcacgtcgacggtatcctgcacggtcagtgcggttacggtcggtgcggcatggcaaccctgggcgatcagcgcttctatgtcggcttgcaggccggcgccgccgctgggatcgtggccggaaatgcagagaacaacagggcgagagcaagggccagtcatcaacgaattccccgaatgcatggcatgatggagtggccggggctaggcacagccagatttcaggcgtgcgagcttatcaccaatcgtcttggccggctcggtgggcggattgccatagccattcatcacgatggcgcagaacctgagtcgaggcgcgcgcctacatgctaaagtgccaccattttcggggtcgcgaactctcagggaattgggttttcctgacgcgggccggcaggttttatacgccatgcatcacttcttgatcttcatgctcggcctgctaccggcactggccagcgcggttgaattcgaccaggacacccggcggctaccgttggggcgggtcatggcggtgctggaagatcccggtcgggatgcttccatctcggacgtgctcgcgctcgatgcggccgggcgcttcgtcgaccatcagagcgatgtgctcaatgcgggttattcacgttcggccttctggctgcgcgtggacttgcggctgcgcccaagccaatccgcgcaccgcagccgctggtggctcgagctggcctatccgccgctggatcggttggatctctatctgccggatgagcagggcaactatcggctcgcccagcagagtggcgatgccctgccgttcggcctgcggcagatccggcaacgcaaccatctattcgagctgcacttactgcctgagctgacgcagcgcatctacatccggttggagagcgaaggctcgattcaggcgcccctgacgctgtgggcgccggcggcctatctggaagagcagtcggcgcacatctacatactggcgatcatctatggcgtgttgctggtgatgctggtctacaacctgttcatctacctcagcgttcgtgatcgcagctacctctattacattctgtacatcggctcgttcggcctctatcaggtctcggtcaatggcctgggcgtgcaatacctgtggcccaattcgccgtggtgggccaacgcttccacgcctttcctgatcggcgcggcaggcctgttcggcagccagttcgcgcgcagtttcctgcatacgcgcgagcacagcctctgggtcgaccgtaccctgatggtggtcatggcgattggcgtgatcaccatggcgatggcgttcacgtcgagctatgcgttatcgctgcggttggccacgctcctggcgcttctgtttatcctggtggtgttcctggccggcagcctcgcctggtaccgcggcatgcgggtggcgcgctatttcatgaccgcctggacggctttcctagtcggtgggttgatcaacaccctcatggtgctcggctatctgccgcattcgttcttcaccatgtacgccggccagatcggttctgccgtcgaggttgcactgttgtctctggcactggccgaccgcatcaacgccatgcgtgaagagcgctccaggatgctgcaggaaaccggtcgcgagctggagcggatgaaccgtgagctggccgagagcaatcgcctgaaggaccagttcctggccaacgttacccatgaattgcgtacgcccatgcatggcattctgggcagcctcgagctgatgcagacgctggaattgaaaggcgagctggaacaataccagcggatcgcgactggctcggcgcgcgagatgatgcggctggtcaatgacatcctcgcgctgacggaactgcaggccggcaggctgcaaatgcgcagccaaccgttcgagctgcgtgcgctgaccgaccagctgttcgccacctatcgggcgcgggcggcgttgcgcggcttgagtctggagctcgacatcgcaggtcacgtgccggaccggttcgagggcgacgccatccggttgcggcaaagcctcggttacctgctggataacgccatcaagttcaccgagcgggggcatgtgcgcctggaactgagtggcgagcaaatggcgggcgacctgttcgtcctggaagcaaaggtgatcgatacaggcatcggcttcgaagcgcccgtcgacgattcgctttaccactacttccgccaactcgacggcagcatgacgcgtcagtacggcggtctcggcatcgggctttctttgtgccgtcagctcgtcgagttgctcgacggcgaaatctcgtatcagtcagcgccgggtcgcggcagctgcttcaaggtgcgggtgcccttgcgccggctttagatcgcctgcgcgcaggttttggccgaaaccgcactttttcagtgcatccatgcatgcttcacttcttcttgcgggtcgctgccagcggcgattcgcgacggcccagcacgccctgacggcgaggtgctaatccacatcctcgccgcgtagcggtctggtcgatcatcgctttcgcctgccaaggagatcctcatgaacctgcaccagtacgccgaaacccatgaggtgctgaaccaggtcccgccgttggaaggcgccaacctgtaccgtctcgacctacccctgcaggactgggtacggcgcaacaagggtggttgggcggagccgcggctcgatgcctacggccagctggccggtgggccgctgatggtggcgggttttctggccaacgaaaacaagccggtgttcaagagccatgaccgctacggccatcgcatcgacctggtggagtttcaccccgcttatcatgagttgatgcgcaccgcgatcgcccatggcatcccctcgctgccctggaccgacccgcagcccggctcccaggttgcgcgggcggcattgatgtacctgcacaaccaggctgaagcgggtagcagttgcccgctgaccatgacctacgccagcgtgcctgccttgcgcctgcaacccggcatcagcgagcaatggctgccgaagatcctcagcctcgaatacgacccgcgcaacctgcccatggagcagaaaagcggggtcaccatcggcatggcgatgaccgaaaagcagggcggcaccgatgtgcgcgccaacaccacccgcgcccatgccatcgacgcgagcggtccgggccagccgtatgagctggtcgggcacaagtggttctgctcggcgccgatgtgtgacgccttcctgaccctggcgcagaccgacaagggcctgtcctgcttcctgctgccgcggcaccgcccggatggcagccgcaatcagttctacatccagcggctgaagaacaagctgggcaactggtcgaacgcctctagcgaagtggagtaccgcggggccctggcctggatgatcggcgaggaagggcgcggcatccccacgatcatcgagatggtctcctcgacccgcttcgactgcatgatcggctccagctcgctgatgcgacaggcgctgacccaggccatgcaccactgtgcccatcgccaggtcagcggtcgcgccctggccgagcaaccgctgatgcagaacgtgctggccgacctgtcgctggaaagcgaagctgccctggcgctgactctgcgcatgggccgcgcactcgatcacccgttcgacgaggccgaggaaaagttcgcccggttggtgacggccatcggcaaatactggatctgcaagcgtgctccggcaatgatcgccgaagccagcgaatgcctgggcggcgccggctacgtcgaggacaccatcctgccgcggctgtatcgcgaggcgccggtgaactccatctgggaaggctcgggcaacgtgcaatgcctggatgtgctgcgcgcattgtcgaaagagcccggcgtgatcgaggtgctgttcactgaactcggcgacggccacggcgatgcgcgcctgcagcgtcacatcacccgcctgcaaagcgcttttgccgataaagacgacatccagtatcgcgcccgtcagctgaccgaagacatcgccgtcgcgctacaggccaaactgctgctcgaggcgggtaacggcgccgtctccgacgccttcatcgccagccgcctggagggctgcggccgtgccttcggcacactgccgcgcgggctggacatcagcgcactgctggcgaggagtgcgccgtttctagactgacgctggtggtggcgtttcgtggcgctcggcgagaacatccgccaagacccgccgatcgatattgccgccgctgagcaccaccgcgatccgctcgccctggttggcgtcgcgttcctgcatcgccgcggccagcgcggcggcgccggcgccttcggcgaggttgtgggtgtcttcgtgcagggcacgtatggcctggcgtatctcttcgtcgctgacgcgcacgattcgcgccgctccctgacggatgatctccagcgcttcgggcgcaggcatccggcaagccatgccatcggcgaaggtgtctgccgtttcggtggtgacgatgcggccctgctcgaagctctgggcataggcgtcggccgcgctggagaccacgccgatgatctccgtgttcaggcccagcaggtcgcgtgtacggatcattccgcagatgccggagccgagcccgatgggcacgtaaatccggcgcaggttcggcaccgcttcgagcagctccagcgcgtaggtggctacgccgcgaatcaggtccgggtgcagggacgggacgaaatgccagccgttggctttggccaactctgcagcccgttgccgagcggtatcgaagtcacgaccgtattcgatgacctcggcgccgcaggcgcgcatggcggcattcttctcggtggagttgccctcggggaccaggatttgcaacggcaggcctgccttgcgtgctgccattgccaggctgatgccgtggttgccgcgggtcgcggtgacgagccccggcagacgtggttcgcgcttgagcagttcatgcacgtagagcacaccaccgcgcaccttgaaggcgccggcgggcgtgtggttctcatgcttgagccagacctcgcagccaagccgctcggcgagtagcggccatgcatattgcggtgtcgggggtacgctctggtgtatcagctgggctgcctgacgcagcgcatcgagatcgaacatcgaaagctccttggcgggtttgacgtcgatcctaggcggcgagcattgtatgggtaaatctttatattgcatggcaaacaatgtggttacccaaactcgaatctgatgatcagccgcgttatctggcgctggtcgatgccattgctacggccattgcccgtggcgagctgaagccgggcgatcgactgccgccgcaacgccggctggcctgggcgctcggcctcaatccgagcacggccatgcaggcctatcgcgaagcggcgcgtcggcacctagtgggcggcgaggtcgggcgcggcacctatgtgctggccagcagccgcgaggccagcctgtttcgcctgaaaaccccggaggctcatccggagctggtcgacctgtcgaccaacctgccggtactcgacccgggcgatgacgatctgcagcgcagcatggcagcgctgtgcgcgacgggtgagctggccagcctgcaaggctatccctcggcgcgcagcctgcagcgtggccaactggcggtgagcagctggttgcgtgaccgagcgctcgagatcccgccgcagcaggtgttgctctgcgcgggggcccagcagggcgtgttcgctgcgctgatcggcttgtgcgagccgggcgagccggtgctggtcgaggccttgacgtcgcccggcatcaaggccgctggccggcaattacggttgccgctgcacggggttgcgatggatggatacggcatcctaccggacgatctcgaccgtctggcccgggccacctcggcgcgcgtagcggtgctgacgccgtgcatgcagaacccgaccgcggtcagcatggatgcgcaacgccgcgaagccattgctgccgtggcgcgacggcgtggcttgttgatcatcgaggatgatatttacggtgcgcttggcgatcagccaccgctcgccgcggctttgcctgaaaggaccttgctgatcagcagcctgtcgaagacggtcgcgccgggattgcgcctggggttcatcgccggaccggagacgtggctgtcgcgtattgatcccgaacggcaggcgaccagttgggccttgtcgacgctatgcctgcggatcggctgccaatggcttgaagatggcaccgcggcacgcagactggtctggcagcgtgaacagatgacgcggcgctggcggctggcgcagaaactgcttgggtctgcctcgtcaggcgcctcgccgcatctgtggcttgaaccggcgaatgtcgaggatctgcccgcgctgtgtcgtgaggcagggatcgaagcggcaacggcagaggtgttcgcagtgggccacggggcgcccaacgcgctgcgtctgagtctgaccgcggcgcccagcctggcgctgttgaaagcgcggctggagtcgctggcgctgcggattgccgcatctgagcgatgagcgccgccatccggtgctaccgctgtcatcgaacagcaggcaagatgttttcaacgactgaaaaaggaaacgcaccatgaattcagcaggcgagactttccgcattgccagcagcgctgaagcggccgtggatcaccttgccgagttgcatcagcatgccacccgcgcattgaatcaggcgctcaagcgctatgtcgccacgcgccaggagcccgacgccgccgagcgcgcgctgttccgctatcccgaactgcgcctgacctacgagtgccacggcgaggtgccggcttccacgcgcgcctacgccaaggtccaggcgccgggcgtctacagcgtgaccgtgacccatccggcgtcgtttcgcagctacctgctcgatcagttgcgaccgttgatcaaggatttcggcgtgaccgtcgaggtgggtatcagcgaccgcaacatcccgtacccgtacgtcatcgagcagggcgatgagctggcggggaccggcgtgactgccgccgagctggcgcgggtgttccccagcaccgacctttccgccgccaccgacgacatcgccgatggtctctacgactgggagcatgccgacccttatccgctggcgctcttcgatggtgcgcgggtggacttctcgctgcgccggctggtgcattacaccggcagcgactggcgccacgtgcagccctggatcctgctgaccaactatcaccgctacgtcgaccagttcatccgccatggcctcgacatgctgcgcgacgacacccgcttcgtgcgcatggtgctgcccggcaacatcgtcatcgaacgtggcatggaggagggcgaggcgcaggcgatcatcggcggcgtgctctggcaccgctaccagatgccggcttatcacctgcaggcgaaggatggcgacggcgtcaccctggtcaacatcggcgtcggcccgtcgaacgccaagaacatcaccgatcacctggccgtgctgcgcccgcattgctggctgatgatcggccactgtggggggctgcggcagtcgcaatccatcggcgactacgtgctggcccacgcctacatgcgtcgcgacggcattctcgaccgggtgctgccgccgcatattccgctgccagcgctggccgaggttcagcaggcactgcaggaagcagcggcgcaggtcaccggcgagcagggcgaagcgctcaagcgacgcctgcgcaccggcaccgtactgacctatgacgaccgcaactgggaattgcgctgggcgcaggaacgccccttgatcaacctgtcacgcgccgtggccgtggacatggagagcggcacgatcgccgcccagggctaccgcctgcgggtgccctacggcaccttgctatgcgtgtcggacaagccgctgcacagcgagatcaagctgccgggttcggccaacgccttctatgagcgtgccgtgacccagcatctgaagatcggcatcgccgcgctcgacctgctgcgcgaccagctcaactcgctgcactcgcgcaagctgcgcagcttcgacgagccgccgttccgctagccgcaaccactgcggcaggtcgcaaaaagcccgagttcagctcgggctttttgtatttgcgttgcatagcgcgtagcgctgatcgtcaggctgcgagcatccagaccccggccaatgcagagccggcaccggcaaggcgcaccagcggggatgccacctggggaagctggcgtgccacggcataaccgatgccgtgcagtgcggcggtggcgacgacgaagccagcggcataaccccaggggctcgccagcgctggtagctccaggccatgggccacgccatgactgagcgcaaacagcgcagtcagcccggtcgccacggccaagggcgggcgcacggccaatgcgaccagcagtccgagtgccaataccgagccggcgatgcctgtttccatcaatggcagctgcaagccggtaaatccgaaaaggccgcccatcaacatggtggcgacgaaggtcagaggtaaagcccagcgtgccttgccagattgctgtgcggcccatagaccaaccgcaaccatggccaacaggtggtcgaggccaaagatcggatgggcaatgccggacatgaggcctgcgtgatcgtggccggggtgggcgaatgccaaagccgggctgagcagcagggcggtggcgattgcgacgttcttttgcagggtcataggggcttcctcggggctgcatgcggtgcgtgttggaaaggcagcgtgtcgctgtcttacggggtcgcgggcagagcccgctcctacaaagggggtgcgatcaggcggcgctgagcattccctgtttctcgatgaaggcgatgatctcgtcgagaccctggccgaccttctggttgctgaacacgaacggcttttcgccgcgcatcttgcgggtgtcgcggtccatgacttccagcgaggcgccgaccatgggcgccaggtccaccttgttgatcaccagcaggtcggacttgcagatacccggcccgcctttgcgcggcagcttgtcgccggccgacacgtcgatcacatagatggtcaggtcggacagctcgggactgaaggtggccgagaggttgtcgccaccggattcaacgatgatcaggtcgaggccggggaagcgccggttcagctggtcgaccgcttcgagattgatcgaggcgtcctcacggatcgccgtgtgcgggcagccgccggtttccacgccgatgatgcgttcgggcgccaaggcttcgttacgcaccagaaactgcgcgtcttcctgggtgtagatgtcgttggtcaccaccgccaggttgtaacgctcacgcagggccaggcagagcgcgagggtcagcgctgtcttgccggaaccgaccggaccgccgatgccgacgcgcaggggttgggtgttcatggatgtctcctctgagggcagtggggttgcctcgggggcgaggcgaaggggcgtgccgctgcccgggtgggcaagggatggaattcgtaaggtgagtttgtttgtcgcttgcggatgcattgcgtattggcagtggcctgggtgcttctatggggcgccgcgctttccttggcgccacctacaggttgcgcctcgcacggcgcgtcactttctcttgtctcgccaagagaaagtaaccaaagagaaggcgacccctgcatccggcccttcgctgcgcgaagggtgccctcactccatcgccgctccaggggcacgctgcgaagggccatccctggcccatcgcagctctcgcggcatccatgccgctcaaccccctccacggcgactacgctcggcctcctgaaggggagtcgagaccgagccgcctgaaagatcgtaaacagcgaaacaaaagcgcttctcttgtttgctgacaaatgacctatcagacgccgccgaccgcccctgttaataggccgaatggaatccgcgtggttcggcaagagctctgctgtagtcagtgctggaaaatgctgcgcagttttccaccctacattgctgaagggggatcgagtccggggtgtctgaaggttcgcgaaaagcgaaacaaaaacgctttgcctgtttcttgacaaaagaactatcagacgacgccgaacgcccctttcaggaggccgagcgtaggtgatgtggagggggttgagcggcatggatgccgcgagagccgcgatgggacatggatgtcccttcgcggcgggcccctggaacatcatcggagcgagggaaccccggcgcagccggggccggatgcaggggcaagcgtttttgcttacttttgaggggccggccatccgggcgtttgaaaaaagtgagtcgcccagcagggcgaaaccaatgcatcggccagctcgcctattagcccgaaattcccagcccagcgccagcaagccgttgttagggcgtgccatattaagggctggcgagactgcggcggtctgggaccaaccgaaccaatcactacgtgcgtgcgctccattcgcgagcaagctcgctcctacagacccgcacgacaaagcgaaactcgccctgctcatgacctaaacaaccgactgtactgccgctcatgccccatgctggccaacaccagcccgaatgacgcgctgccccatgcgtcttccggcagctcgcgggcatcccgctgcgcctggtacagcgctggcagtagctgcgaggtcaaccgctgtgccgcctgctgccccagcggcagagtcttcatcagcaccgccagttgattttccagccaaccccagagccaggccgtcagcgcatcttccgggctgatgccccaggcacgtgcggccaaggcccagccaagggccagcccaggttcgtcgatgcgctgaaacagggcgcgggccggggcgtcgagttctggcaggttctccagcaactgcctcagcgaatagcccatctgccggctctccagccgcagctcgcggctttcgcggctggcgcgatggcaggcggcgaggcgctccagttcggcccattcttcagccgtggcggccagacaatgcgccagcagcaaaggcgcttcgaagcgcgccaggttcagcagcagctggtcggccagccagcgaccggcgctggtttcgtcctgcacgcgctgctgctcgacggccatttccaggccttgcgagtagctgtaaccgccgatcggcaactgcgggctggcgagccgcagcagggcgaacgcggcgggattcacctgcgcgtgccgaattgatgcaggcgcggcgcatagctgaactcggcttcgcctgcgtgggagtggtgatggccgccaccgtaggcgccgtgctcgggctggaacggggcttcgatggcttcgacacgggcgcccagctgcagcagcatgtctttcaacacgtagtcgtcgagtaggcgcagccaaccgtcacccacctgcagcgccacatggcggttgcccaggtgataggccgcacgcgtcagttcgaacgcgctgctgcaggtgacatgaagaagctgttcggcgcgggcccgtacgcggacgatgcggccatcttcggcgcgtaggcattcgccgtcatgcagcggctgctggccgcgctcgagaaacaggccgacatcctcccccgtggtggtgaagcagcgcaggcgcgatttgctgcgcgcctcgaaggtcagctccagctcggcgtcggcgtcgtcccgtggggcagtgcggtgatggatgaccagcatggcgagcagtttccggttgtgcaatggcacaagcagagcaaggcccttgccaacccggtacagccggcaccttgcgccggctgcgagagccgcgcgccagaaaacggggcgtttcggtggtccgttatggtgcgcatggctcggtaaggcaccataggcgtgcagatcagtgcagcgcgcggaccatgtacacggcggggatctggtagctggccaggttgtcgacctgaggtgcctccagctcgtcgtgcgtggcgtagccgaggcgcgaccagaacgcctcggactcctgcaccgacaccagcgccgagtagcgcagctgttggctgcgcgcctgctcgaggttgcgctgaaccagcgccgggccgatgccacggccaccggcgcggcgggaaacggccaagtcgtgcagatacaggcagtcggcttcggcatgcggctggaagtggccgtccagcggggtaaccttgccgacccgtgaatggtaggcgaagaggtaggcgcaaacgcccagctcatcttcggcgacccaggccaactgggggcacgcggcgaggcgggcacgtatcaccgtctcgtcctccagaacctcggcggcgtaggattcttcctgaatcgacatcacggcaggaatatcgcgcacctgcatcgctctcaacttgaacatcgaacacactcgaacggacgcggccggccaggcggctcgcgcggggcggcgatcatacgcgatcggcggttacaaggtgagggggccgacgaagggttcgaagcgacggctgtcggttcggctcatccgacaactgacgaaatgccgatttacgggcataattcttaggttgctacctattgtcgcggtttcgcattgaataattcacatcggcccctgctcggcgtactgctcatactggtctcgtgcctgaccctggcttcgcacgacgggctttccaaatacctgacccagctctacccggtcttcctcgtcatatgggcgcgctacctgtcgcagaccgcgctgatgatcgccctgttcacgccgcgcatgggccgccgcgtgttccacacactgcgcccgaagttgcagatctgccggggtttgagcctggtcagcgtcagcatgctgttcatcagcggactgagctacatccccctggccgaggcgactgcggtgatcttcctcgccccgctgatggtcacgatcgcctcgagactgctcggcgaacaggtcagccgcgcccaatggctggcggtcggcttcgggctcgttggcgtcatgatcatcgtgcggccgggcggcgcgctgtttacgccggccgtgctcctgccattcggcgccgcgttgagcttcaccgtctatcagctgatcacgcgccggttgagtgcgaccgatcacccggtgaccagcaacttcatcaccagtctggtgggcagcctggtgatgagcgtgctggtgatcttcaactggcaggccccgacgctgcacgacgcgctgatgatggcggcgctcggcgccatggccatgagcggccatttgctgctgaccaatgcctttcgctttgccagtgcggccgcgctggcaccgttcacctattcgcagatcatctttgccggggtggtcggaatgatcgccttcggccatacgccggacctcggcgcgatggtcggcatggccatcatcatcgccagcgggctggtcatggcctacgtgcaggggcggcagctgcggctgcgtccctgaaaaacaacggccggcccgcgggccggtctgcgatacccacattcgaccagacaagggcgattcgacccttgcgtgcgttcaccaggaaaagagacatgcaacgtatttcgcaccacaccctgcgccaggatttccgtcagttgctcgcggccgaccgctgctaccacaccgcctcggtgttcgatccgatgtcggcgcgcatcgctgccgacctgcaattcgaggtcggtattctcggcggctcggtcgcctctctgcaggtactggcggcgcccgactttgcgctgattaccctcagcgagttcgtcgagcaggcgacccgcatcggccgcgtcgcgcgtctgccgatcatcgccgacgccgaccatggctacggcaacgcgctgaacgtgatgcgcaccgtggtcgaactggaacgtgccgggatcgccgcgctgaccatcgaagacaccctgctgccggccaaattcggacgcaaatccaccgacctgatcggcatgttcgaagcggtcggcaagatccgtgcggcgctcgaggcacgcatcgatccggagcttgccatcatcgcgcgcaccaatgccggagtgattggcctcgaagaggtcatcgcccgcgtgcaggcctacgaggcggcgggtgccgatgcgatctgcatagtgggtatcgatgatttcgaacagctcgagcaggtcgcggcgaagctgaccgtgccactgatgctggtgacctatggcaatccgaagctgcgcgacaatgcccggctggccgcgctcggcgtacgcatcgtggtcaatgggcacgccgcttatttcgccgcgatcaaagcaacctacgattgcctgcgcgagcagcgccagatcgatgcatccgacctcaacgcttcgcagctctcggtcaaatactcgaccgccgaggagtacatggtctgggcggaggaatacatgcaggtcaaggagtgaccgattgcttccggctgcgtgctgccggcaaccttccacgctagcggagaatcgatgagcccacgcctgctgaccttcatggtggcgttcgccgccttcctcgggcccttcacgcagacggtttacgcgccgatcctgccggagctgggcgaggcactgaagaccacgccgctgctgatcaacctcagcatctcgatcttcaccttcgtgctggcgttcatgcagatcgtgtacggcccgctggtcgatcggaccgggcgcaagcccacgctgctggccgggctgggcatctacatcgtcgcctcgctgggctgcttctggtccggcagcatcgaaatgctgctggcgtttcgtgccttgcaagccgttggcatcgccgcgggcgcggtggtggcggtcacggtgatcggcgatcgtttcgaaggggccgagcgcgggcgggcgatggggtcgttccagatgatggtcgcgctggggccggtcgtggggccggtggtcggcggctttctgggcgagcatctggacttccactacgtgttcctgctgctggccatcgtcggcggtgtagcgttgctgagcaacgccatctgtctcgaggaaacccgcccggccggaagccagccgcgtgcctttcaccctgggcagtatctggaggtgctgcgcaaccgccaggggctggcgatcatgttgctcagcttcgtccagtactacgccttctataactatctggtgttcatgccgcgggtgctcgacagcagctacggcctgagcgctgctgagaagggcatggtgttcctgccgctgtccatcgcggtagtgatcggcagtttcagtggcgggcggctgctcggccgctggcgggcacgaccgatgctattggtcacggcgctgctcaatgcgctcagcctgctgctgttcatgacgatcgcgcaggtgtcgcttgcggccctggtggtcgcggtgacggcgttcgggctgttcctcgggctgtcgctgccggtgcagaccagcctgctgatggatctctaccagcacaatcgcgccaccgctgtgggcagctacaacttcttccgcttcatgggcatggcgaccggaccggtgctcggctcctggctctatcgggacggcaatctcggtgtgctctatggcttcgccgcggcggcctttctcctggccgtctggcacgcgcgggtgcgcttcaaccaggcgcgggccggggcctagaacaacgcccgctcggccttgaacatgaagtaactctcgcaatagctgttctgcccggaatagaccccgcactgccgtccgctcaggttggagtcggtgtaggtcaggtcaaggtgcacgccgagcagcgggcgggacaggttgagcgaccagtcattgaagacccgcacgctgccgcccatgtgatacatcgggctgtccatcgaatggctggcgtacttcagcctcaccccgacatcgaatggctgaacggaccccagctccatgagcagggtgctgtcggttcgtcccggggaagcactcaacgcaccgcccagacggctgccggcgaggttgatcccggcatagaactggtggcggtcgtggttctccagctcaggaaagctatagcgaatgacacccagctcgaaacccggcatatcgccgatatgcggctgggcatagccggcgtaggtgtccagctccagcgtcctgccttccaggatgcccatgcttggcgcccactgccccaggtacaggccgctggcatgcgtcaggtccagcccgccgcggaaggtgctggcggcggacgggctgaccaacccctgcgccatgctgcgcgtcggcgaagtgccgagcttgaggtcgaaggcccccagttcgcgttcgacgacctccggttggctggcgcatccaccgaagatgagcaaggccgccatcacggcgagtttctggttcatacgttgattttttggctggatgagtcatacaagccgctcgggagcgaccacgaaggcgatgccgatccagagcgccagaggtatgttgacgctcgcttttgatcaatcgaacgcaagggtagtcgatgacccggcgccgatttttccactcgtcgttttgacgccaagtgaacgacgggcggcgccggctccttggcgttcaccgaagggtgtcgctattggcacactgaacggcggtcgcctgcgccgttccatatccctatgacggtaatctgcctctaggcaggcgggagatagcgatggcaaccgggtgggcaaacgaaggcgcggtacaggaacagatcgatagcaccatcgaggatgcggtgcagcgggcacgcagccggctggggcgaggcgagagcctgacccattgcgaggagtgtggcgcgaagatcccggaggcgcggcggcaggcggttcagggcgtgcggctgtgcgtgaagtgccagtccgaacaggacaagcaagaagccaaattcagcggctacaaccgccgcggcagcaaggacagccagttacgctgatagccatatcgcacggcgcatggtggcgctgcgcggagtcgccgcgaagctaagatcgcctcgatgttccggtcggcatgctgaaggtaaaggtggtgccggcctcggcggtggaggtgacctgcatcctgccgccgtgcgacacggcgatctcgttggcgatatacagcccgaggccgagcccggattggacattcgacgcctctcgccagtaaggctggaacaactgcgcctgacgctccgggggaatcggctcgccctgattgttcaccgccagcagcaagcggccctcggcgaccctcgcgctgacgtgtacccggccgtccttcgagccatgcaccagggcattggcgatcaggttggacagcaattgcgccaggcggtccgcatcgcagcggatgccttcgagtgggtcgatatccgcctcgatcgtccgctgcggatggctgctctgcatttccgacacgatatgcgtcagggtgacatgcagcgtgtcgcattcgtcgttctgcagcgggatgccattgcccaggcggccacgggcgaaatcaagcacatcatccaccaggcgtgacgcgcggcgggtcgccgtgagtatgtgctcgacgatgccgatgaccgaggtgtccttggagcgcctcaatagcaactgcgcgccggacatgatggatgagagcggattgcgcaggtcatggccgagcaaggcaatgaactgctcgcgcagctcggccgtctgctgtgcatcgagcagcgcagcttcggtcgcctcgaaatgctcttcggcctcgagctggatggccagcagtttggcgaaggactccatcatcgccaggatcggcccttccgacagattggccggtagcgggtcgagcgcacaaacggtaccgaagaagctgccatcggtacgaaacaccggagccgagatgtagctttcgaagccatacatcttgggcgtgtggtggttgcagtagcgctcgtcctcgctcaccttgctgatgatgatggtctggtgcgaggcatggatctcgtggcagagggtcgtcgttacgtccagctcaccaccgacctgcagaccgaagttgatctggtcgagcaccgtgcaggccgtccaggagtcgtccgtgacgcgcgccacggcggcgaagcgcaacccggtggtttcgcagatgacctgaaggatggcgggtacggcgttgatgcggctgatagccgagatatcgtcggttaccgatcggttcatgcggattgtcttggcggcgcgtggtgatggccgggcacattatcacgggccgatgaccataccgagtcgggccgaccaatgccgacccgactcgatgggcgcgctaggcctgcgtcgtcagtggcggcgtcgcgttggccgggacgatctgcttgcgcatcagcaggtaatgcaccaccgcaccgaacaatgcgccgagcagccaggcgaagcccgacaggctttccaggcccggcgtccagaccgaggcgaccgagaacagcgagctgatcccgaacgcgatgattgccttgcgattccagccggcgttgaagtaataggccgaacccggtgcggccgaaaacaactgctgcacgtccagccgttgccggcggaccaggtagtagtcggccacgatgatgccgtacagcggcgccagcacggcgcccagcgtatcgacgaaggcggcgatacccaccgcactgatgaacgacacccacagcgcaccgatgaagaacgcaatggctgcggtgatgtagccgccggtgcgtgcgctgacatgcgccggtgccagattggcgatgtcataggccggcgggatgaaattggcgaccaggttgatcccgacggtggcggcaaagaaggtgatcgcggcgatcagggtcaggccgacattgtcgatgcgcgagacgatatcggtggggttggtcagcgtctcgccgaacaccaccacggtaccggcggtgatcaccagggcgatcagggaaaagatcgccaggcttaccggcaggcctaggagattgccgatacgcatctgccgctcgctcttcacgaaacgggcgaagtcgccgtagttgatcaccaccgccgcgaaatacgcgaccatggtgccgaccacggcggcgaaggcggcgatgggcccgccggcgtagttgccggtgccgctgaagataccgcccagcgcgccggcaaggcttggaccggcctgataacagatggcgatcatcatcgcgatcatcaccagataaaccagcggcccggcccaattgaggaagcgcgtcacccagtccacgccccgcacgaacaacgcgacctgaaacacacagacgatgacataggcgatccagtcgaccgtcgtcagccccagcagcgtcgcatccgagccgggaccgaccagcgtacgaatcaacagcgccacggcggtcgaggcgaaataggtctgcacgccgtaccagaatatcgccacgatgccgcgcacgacggcgggaaagttcgcgccgcgtacgcccatgctggcgcgggccatgaccgggaacggaatgccgtacttgacgctgggcttaccggtcagttgcaccagacccatgacgataaaaccggccaatatgatcccggcgagcaccgcccagccgttcaggccataactgatgaacagcgtggcggcgagggtgtagccgaacagactttgaatatcgttggaccagacgttgaaaatctcgaaccagccccatttgcgcttggccggggcgagcggggcgaggtccgcgttatacaggctgggatcgatctgcttgatctggaagtcgtcgtgattcatcggtatacgccctgtgcagattgttgttagctttttgtatgcagttcttgttccgtggacggcgaagcatcagtatttacgtggtggtcgatggcatttctggtccgcacctcaccgaagagtagacgcggcgggcgttgccgttagatttttttgtatacaaagaattgggcgcggttatgcgattgggcctttcgcccgcacgtttatgcaccgtttgagcggcccgaccgggaggatgcgacatcggagtgcaagatcgcggtcaagaccgctcctacaaggggcagggcgccgaactgtgggagcggtctcgaccgcgaaggggggcggcattggagtaaaagatcgcggtcaagaccgctcccacagggacagggccggacccgtgggagcggtctcgaccgcgaagggggcggcactggagtaaaagatcgcggtcaagaccgctcccacaaaggggcagggcaccggactcgtgggagcggtctcgaccgcgaaggggggcggcattggagtagaagatcgcggtcaagaccgctcctacaagaggcagggcgccgcttccacaaggacagggctgaacctgtgggagcggtctcgaccgcgaagggggcggcaccgaagtaaaagatcgcggtcaagaccgctcctacaaaggtaggcgccgaacccgtgggagcggtctcgaccgcgaagggggcggcattggagtaaaagatagcggtcaagaccgctcccacaaaggggcagggcgccggacccgtgggagcggtctcgaccgcgaagggggcggcattggagtaaacgatcgcggtcaagaccgctcctacaagggcagggcgccggacttgtgggagcggtctcgaccgcgaagggggcggcattggagtagaagatcgcggtcaagaccgctcctacaaaggtaggcgccgaacccgtgggagcggtctcgaccgcgaagggggcggcattggagtagaagatcgcggtcaagaccgctcccacaattggccggaccgccccacaaaggcaggattgcccacaagaccagggtcgaacccgtcagaacaaaaaatagcgctgcgccattggcaacacctcggccggttcgcaccagagcagctggccgtcggcgcggacctggtagttctgcgggtcgacctggatgtccggtgtgtagtcgttgtggatcaggtcttttttctgtaccgagcggcagcccttcaccacgccaatcttcttcttcaaccccaattgctccggcacgccggcctcgaaggccgcctgactgataaaggtgaagctcgacgcatgcagcgagccgccatagctggcgaacatcggccggtagtgcaccggctgcggggtcgggatcgaggcgttggcgtcgcccatcaggctggcggcgatggcgccgcctttgaggatcagcgtcggcttgacgccaaagaacgccgggcgccagagcaccagatccgcccacttgcccacctcgaccgaacccacttcgtggctgacgccgtgggtgatcgccgggttgatggtgtacttggcgatgtagcgcttggcgcggaagttgtcgttgcccgcgccgtcgccgggcagggcgccgcgctgcttcttcatcttgtcggcggtttgccaggtgcgggtgatgacctcgccgacccgacccatggcctgactatcagagctgatcatcgagaaggcgcccagatcatgcaggatatcctcggcggcgatggtttcccggcgaatgcggctttcggcgaaggccacgtcctcggcgatgctcgggtccagatgatggcagaccatgagcatgtccagatgctcgtcgatggtattgcgggtgaagggccgggtcgggttggtggaactcggcaggacattggggaagccgcaggccttgatgatgtccggcgcatggccgccgccggcaccctcggtgtggtaggtgtggatggtgcggcccttgaaggcgccgagggtggtctcgacgaagccggattcattaagcgtgtcggtgtggatcgccacctgtacgtcgtactggtcagccacgttcaggcaattgtcgatggccgcgggcgtggtgccccagtcttcgtgcagcttgaggccgatggcgccggccttgacctgctcgatcagcggttcgggcagcgaggcgttgcctttgccggtgaagccgatgttcatcgggaaggcatcggcggccttgagcatcatcgccatgtgccaggggccgggcgtaactgtggtggcgttggtgcctgtagctgggccggtgccgccgccgatcatggtggttacgccgctcatcaaggcctcttcgatctgctgcgggcagatgaagtggatgtgcgagtcgatgccgcccgcggtgaggatcatcccttcgccggcgatcacttccgtcgcggcgccgatggcgatggtcacgtccggctggatgtccgggttgccggccttgccgatggcggcgatgcggccgtccttgaggcccacgtcagccttgacgatgccccagtggtcgaggatcagcgcgttggtgatcagcgtgtcgactacatcggcagcgcacagctggccctgccccatgccgtcgcggatcaccttgccgccgccgaacttcacttcttcgccgtaggtggtgaagtccttctcgacctcgatccataggtcggtgtcggccaggcgcaccttgtcgccaacggtggggccgaacatgtcggcgtaggctgcgcgggaaatcttcatcctcgttcctcggattcaggccataggctgcaggccaaagcgaatgttgagcggcttctggcttgtagcctgccgcctgtagcttgtagccgctcgtcagagcgcccccatcacccgcccggcaaagccgaacacccgccgatcaccggccagctcgaccagctctacctcgcggctctgtcccggttcgaaacgcactgcggtgccggccggaatgttcaaacgcatgccgcgcgtggcggcgcggtcgaaggccagcgcgtcgttggtttcgaagaagtgatagtgcgagccgacctggatcggccggtcgccgctgttggccacggagagggtcagcgtgcggcgaccggcgttgagctcgatgtcgccgtcctggatctggtattcgccgggaatcatggattggacgtcctgttcagggtcagttgcatcatggtcaggtccagccagcggccgaacttgcagcccacctggcgcatctggccgacgtgaatgaagccaagctgctgatgcatatggatcgaggcgcggttctcgctttcgataaaggcgatcatcacgtgcttctccagctgccgggcgcgttcgatcaacgcctgcatcaggcggcgaccgatgccgctgccacgatggccggggccgacgtagaccgagttctccacggtatggcggaagccgtcatgtggacgccaggggccgaaggaggcgtagccggctacctgcccgtggtcgtcgatcgccaccagaacggggtagttctgttcgtggcgctcggccagccaggcgcggcggttgtcgagatcgaccgcgttgtcattccagatcgccgtgctgttctgcacggcgtcgttgtaaatctgcaggatgccgtcgaggtcggcatccagggcgtcacgtatctgcacgttcatatccttcggtagcggttcaagagtcgtctgcagtagacattgacccgcgtttcagggaataggttggtgcacggtgaccagcttggtgccatccgcaaaggtcgcctcgacctgaatctccgggatcatctccggcacgccttccatgacctgttcgcggctgagcagtgtcgtgccgtagtgcatcagctcggcgaccgtctggccgtcgcgggcgccctccagcagcgcggccgagatgtaggccatggcctccgggtagttgagcttcaacccgcgggcgaggcgacgctcagctaccagcccggcggtgaagatcaacatcttgtccttttctcttggcgacaaatccataaaggctccagtcgttgggtgaatgtcgcttttacatccaccggcgagtggtcgaaaccacgcagctaatcagtccggcgcgccactgcggcacgccggcgtatatgggtaacggcaagctttcccaccgtgttcatgtgctccagatccttggcggcaccgcctcgcggcccagcaccgcagggcgcagcaggcgccacatctcgatcagccaggcgcgggcgtgcagggcttcactggccagacagcggccaacaatcaggccgggcagctgtgtcaggtcgccccgaacccggcttgggcgttcgcggcagcgctccatcagctcggcatcgatctcgccggtcacgatcagcgtggcgaaaaccgggttgccatcgagcccgatgggcgaatccagcaggccatcgttgcccctcacgcgctggcgctcatgccagagcagttccccgtcacggcggatgttcagcagtgcctggaagtggcccgcgtcgaagcgctcgccgctggccggtcggcccagcgccatgatgtcccagtagaacaaccgggcatcgccctccaattcgatggatgtggtgagctcggcctgcgccgctgaatagacgatggtctcctgcggcagccattccagcgtcgcgccggcctcgacacgcaattgcacgttctggaaagccgggccgacagcccgataccacttcgccgcgccagggctggtcagctgtgtccaggcaccgctgccgaccgcggcgctgacgtccagtcgatcaccgccggcaatgccgcccggtgggtgcacgatgatgtgctgacagacctccggcccctctggatagaggtgcttctggactctcaagggcccactgtggcggcgcaacaccggacgtgtcgactcgtcgaagcgggcatagccaagttcgagttcggcgttccagtgaggcgtgaacagtgacgtaagggcagtcatgggccgtgatcagcaatgtcgatgacagagtcgagcaattgttgtgcctttcgcgccacggcggtgcgctgggcgggactcgctgggtgtgaggggctaaacgaatcggtccgaacggcccggctgcacgaagctgatgccctcggatggtgcgctaccaggactttgagtgatggatgacccggtttggtgcgtcgagcccgcccggtcaggctagtcctgcttgcgcttgatcagatcaacttggtgagtcgctgaaacagattgttgcgagcatcacgctgctttatgggcctttatctcttccaggctgctcgtttgacgagggtgcaagcgagtgccaatgtcagtcaggcgcagttccgatgcccctcggtaatcactcggtggcacccataacaacaagatccacggagacgccgcattgaatctactgtttcagcaagtgctcaacggcctgaccctgggcagcatctacgggctggtcgcccttggcctgacgctcgtctacggcatcctgcacattcccaatttcgcccacggcgcgctgtacatggtcggggcgttcgcgtcctactttttcatgaccgacatcggcctgcactactggatcgccatgctgctgtccggcttggtggtggccgcgctggcggtgctgtgcgagcggttggtcttccatccgttgcgtaatgcgccaccgatccacgacaagatcgccgccatcggcatcctgctgtttctcgaagcggtggtgcagatgttctggggctcggacttccgccgcatggcttcgccctacggcggcatcctcaacttcgacgggctgatcattcccgagcagcgcctgttgatcatcgtcggcgcctttaccctgatgctggcgctgcacctgttcctgcgcaagacgatgctcggctcaaccatcatcgccatggcgcagagccgcgaaggcgcctttctcgtcggcatcgacgctaaccgcgtggcgatgttgacgttcgccatctccggcatgctcgccgccttcgccgcgacgctctatgcaccgattaacctggtgtacccggcgatgggccatctggtgatcatgaaggccttcgtcatcatcgtgctcggcggcatgggcagcatccccggtgccattctcggcgcgatgattctcgggttcgccgaaagcttcggcggcttctacctgtcctcggactacaaggacatcatcgccttctcgctgctggtggtgatcctgtcgctgcgcccaaccgggctgttcgccaagggggctcactgatgcatcgtttcgcctctttactgactgggcgcggctgcaagctggcggtgctggccttcgccctggcgttcccgctgttcgccaagagcgaataccaggtctacgtgatggccagcgccttcatctgggccatcgcggtctacggcctgaacatcatcaccggctactgcggccagctgaacctggctcacggcggcttcttcgccatcggcgcctatgccctggcgatcctcaccgctgaccatgactggaatttctggccggcctttttggcagcagcgctggtttccgccgccgtcggtgcgctggtgggcatcgtctcgctgcgcttgaaggaacacttcttcgcgattttcacgctctgcgtcggcttcatcatttatctgctgatcgacaagtgggaggagctgacccacggcgccatcggtatccgcggcatcgccgcgccggatggcttcgggctggtggatttcagccagacggtgccgttctactacctggcgctgctgtttctggtcctggcgatctggttcgccgggcgcctggcctcgtccctgctggggcgcaccttcatggcgatccgcaacggcgatgcgctggcgcagtcgctgggcatcgacctgatgcgcaacaagctgttggccttcgtcctgtcgaccacctacgcgggggtcgccggagcgctctatgcctcgatgatccgcttcatcggcccggaggaggccaacccgaaccacaccttcgacatgatcacctacctgctggtcggtggcttcggcaccctgttcggtccgctggccggcaccgtcggagtcgtctggatcacccaatcgctgcagttcctcgaagactaccggatgatcatttttggcccgctgatcgtggtgctggtgatcttcatgccacgcggcgtcatcggcaccttcctcggctggaagctgcgcaaggacaccgcggcagcgcgggcgaatgacccgcgtgccgctaccaaggtcgccccaggcaacgaggtgaacaacaatgcttaaggtcgaaaacctgaccaagatgttcggcgggctggctgcggtacacgacgtcagcgtcgagttcgaggcgcgcaagatcaacgccatcatcggtcccaacggcgccggcaagagcacctttttcaacctgatttccggcgtgcacaagcccagctccgggcgcatccttatcggcggtcaggatgtctcgcggatgcgctgcgaccgtgtggcccggctcggtgtcggccgcaccttccagaccacgcacctgttcgaacaggccacggtgctggacaaccttatcgtcggtcaccgtttgcgcacccattcgggcctgtgggacgtgctgatcaactccaaacgcctgcagcgcgaggagcgtgaatgccgtgaaaaggcgcgcgccgcgctggatttcgtcggcctcgcgcacctggagaaccgcgtggtgctggatatctcccaggaagaacgcaagcgcgtggcctttgccctggcattggccaccgagcccaagctggtgctgctcgacgagccggcggctggggtcaatcccgaggaaaccgaaggcctggccgagctgatccgcaagatgcccgagcacggcctgaccgtgtgcctgatcgaacacaagatggacatgatcatgggcctggcggacaagatcatggtgctcaactacggcgagaagatcgccgagggcacgcctgccgagatcaaggcgaacccggccgtcatcgaggcctacctggggagcgactacgatgctgcagcttgatcgggtcgacgtctgctacggcagtttcaaggcgcttactcaggtttcgatgacggttggcgctggcgaactggtggtccttctcggggccaacggcgcgggcaagaccaccttgttcaacaccatcagcggactgctcaagccgaccactggaaccatcacgctggaaggcaaacgcatcgacgggctcaagccttcggcgctggtcgccgcaggcgtggtgcactgcccggaggggcgcaagctgttcccgcagatgtcggtctcgcagaacctggcgctcggtgcctacctgcaccggcgcgacggcgagggtaacaagcgcaacctgcaggaggtgctcgagctgttccccatcctgcacgacaagcgcaaccagccggccggctcgttgagtggtggccagcagcagatggtggcgatcggtcgcgcgctgatgagtcgcccgcggctgctgatgctcgatgagccctcgctggggctggcgccgttggtggtcaatcagatgttcgaggtgatctcgcggatcaacaaatccggcaccagcgtgctgctggccgaacagaacgccttcgcggcgttgaagattgcccaccgcgcctatgtcatcgagggcggcagcctggtgatggaaggcgaccagcaggccatgctgggtaacgaagccgtgcgcaaagcctacattggcgcctgatcagtcatgaccaaggagacaacaatgaaaacgctcaaagcgcttggattggcgattgccaccctgaccgcggcccaggccggcagcgtgtatgccgaacagaccctcaccatcggcttcaccggcccgctcagcggcggcgccgcgctctacggcgagaacaccctgtccggcctgcgcatggcagtcgatgacgccaacgaggccgggggcctgaagatcggcgacgagacctacaaggtcaacctcatcagcctggatgacaaatattcgccgagccaggcagccaccaatgccaagcgcctggtgaaggaatcgaacgccgcggccgtgttcgtgccgcacaccggcggcgtgttcgccttgcaggacttcaacgtcgccgacgacttcctcatcatggcctacaccagcgtgccctcggtcacccagcagggcaatccgctgacggtgcgcattccgccggaattcaccggctacgtggatgccttctccgactacgcactcaagcattacggcaagaagctcgggattgccggcgcgacccacgagtacgccaagatctggaccgacatgatgaccaaggcctggcagcagaagggcggtgagatcgttgccagcaatcccatggactacaacaagtcgaccgacttctacaccggcgtcagccgggtgatcgccgagaacccggatgtgatgttcgtcggtggcgcctcggagcccaccggtctggtcatgcagcaggcgcgtcagttgggcttccagggcggcttcatcgtcatggaccaggccaagctggacgaaatcgccgcggtcaccggtggcctggatctgctggaaggctccgtgggcgtcgtgccgctttccgagtacgacagcgaggtcgccaaggtcttcatcgatcgctaccagaaggcgcacggcaaagtgccgggctctgaggctgcctacaactacctggccttccatgcgctggccaaggccatggagctcgcaggcaccaccgaaccgcagcaggtcagagccaagatgggtgaagcgctgacgaccatggacccgaagttcaacctttactcggtgcagggcatgaccgacaacggcggcttcatcacaccgaccaccatggccgtggtggaaggcggcaagatcgtcagcaagcagatcggtgagtagccagccgccagattcttcgaaaattttctgacggttccctgatttgcttacgagcgccggtggtgccctgccagcctagctggggcgtgggtgacgtcccgctaggataggggcgggccggtctttttccttgccgtgcacataacctttgttgggcctgaaagctccgttcactcgttgcgatccgtccgctaggctctgggcctcgaagtcgctcattgccgggagccgctcgtgcgagcgaagaaacgctgcttggcccactccgagcaggctgcgtagagcacggtgatcagcagtaccgcgctcaggaccgatgccggcagtggctgcaaggcgaaccaaccgccgaccggcgtatagggcagcagcaccgtcagcacgccgatgataatcgaacttgccagcagaaagcgccctggacggctgcggtagaacggcttgtgcgtgcgcaccacgaagatgatcacgagctcggtgatcagcgactcgacgaaccagccgctgcggaacagctccggctgttcaccgaccaggtagaccagcaggccgaaggtgagcagatcgaaggccgagctgatcaggccgaaggtgatcatgaagcggcgcacctcgctgatgtcccaacgatggggcgtgcgcgaccagtcggcatcgacgcggtcaccagccaggccgacggccgggatgtcggacagaaagttgttgagcaggatctgtttggccagtagcggcaggaacggtagaaagaacgatgccagcgccatgctgatcatgttgccgaagttggcactggtggtcaggtagatgtacttcaaggtgttggcgaaggtgcgccggccttcgtcgatgccctggcggacaaggccgagttcgtgtcgcagcaggacgaagtcggcagcttccttggccacatccaccgcgttgtccaccgagatgccgacgtcggctgcgtgtagcgccggcgcgtcgttaatgccgtcgccgagaaaaccgaccacgtggccggtcttctgcagcgcgcggatgatgcgctccttctggttgggatcgacctcggcaaacaggctgacccgtggcgccaggttgatcagcgcctcgtcgcgcatttgcaccaactcggcgccggtgatgacgcgctcgacatcgatgccgacgctctcggctacctgccgggcgatcaggcggttgtcgccgctgatgatcttcaccgccacgccgagttctcgcagggccgtcagctcgtcgcgcacgcccggttcgggcggatcgaagaacagcaagaagccggcgaagatcaggccctgttcatcgtcgacactgcagcgctcgcgctcgagcgagcgccaggcgaggccgagcacacggtagccggcggcgctccagctggcgaacctcgcgttcagcgcctcgcgacgggtctcggtcaatggcagtacggtgtcaccctgttgcaggctctccgaggcttgcagcacattgtccagcgctcccttgcagaccagcctcggcgtgggctggtcggcgtcgcgtaccagcacgcttaggcgcttgcggacgaagtcgtagggaatctcgtcgagcttatcggcgctggccatcgtcggcgcctggctgctcgcgtggtcgcagatcgattcgtccagtgggttgcgcaggcctgtctgcagcgaggcattgagccacgccatgcgcaggaccgttgcgctgggctggccgtcggcatccagagcgccgtccagcgccaccacgccgcgagtcaatgtgccggtcttgtcggtgcagagcgtatccatcgcaccgaggttctcgatggcattgagatggcgcacgattacgccgcgcccggccatgcgctgggcgcctgcggagagggttgcgctgaggatcgccgggagcagctccggcgacagcccgacggccaaggcgatggcgaacatcagggtgtccagtggcgggcggtcgagaaacaggttgagccccagcaccgccgtaaccatgaccagcatgacccgcaacagcagcccgccgaagtggcgcaggccgcgctcgaattcggtttccggcgggcgcagcaccagtgagcgctcgatatgccccagttcggtgtgcacgccgcagcgcaccgccagcagtcgcgcggtgccgctgcgcagcgaggtgccgcggaacaggcagttgtcacgctgtgaaagggcggtgtcggcggcaatctggcccgcgtccttctgcaccggaaaggtctcgccggtcagcagcgcctggttgacgaagcagtcgtgcgcctccagcagccggccatcggcgggaatcaggctgccggctgacagttcgatgagatcgccgggcaccacttcgcttgccggaatgctctggatgcgtccgtcgcgccagacatcggcacggctggccacctgctcgcgcagtcgcgcaatggcccggttggaacggacctcgtgcaggctgccggccagtgcgctggcgatcacgatggtcagaacgatcaacgcgtccagccagtcctgggcgaccagcgcgacagcggcaccgatcaacaggatcagcaccagtggactggccagctggcgagccagcgagctcgcaattacgccaggcagcccgagacggtgtgcatgcttaaccgagggctggcgagaggcggcctgctcgctgcgcaggccgtccggacccgcctgtaggcgctcatggagcgcgtccagcggcacgctccaatagtctgccgccgcttcgctgttgtcgtcttccggccgtgcatgcagtgcttttctggacagccagaatccgggcagcatcggcaaccagaagctcagggcacgaaacagcagggtggctgaaagccctgctgccaggggcacgccggcccagctgagagtggctaccgaggccgcttcgaaggctcccaaccccccggggacgataccgacgctgcgcaatacgctggccagcatgaagctcgcgaagatgccggtgaagggtgccgaatggccgaccgcgaagagcagcgcccagacggtcagcgcgtcgagcaagacgatggcgagcgagtagccgctcgcgcgcaagagcagcgcagggctacgggtcagatggggatctgcggccaataccatcgccagcaggcgttgcatccagcgaacgttctgcaggcgtctggccaagcggctttgtcctagcccggcgatcagtggcgcggcaatggtcatcagacagcagaacagcatgaacgccgcgctggtggctataaccgccaggctgccatggccgctgccgactgcgaccaccagcgccgcggcgagcgccagcaaataggccgcgaaataggacgagacgctgacgatgaagcagctcgagacttgcgacagctcgatgccacgccgctgcagcatcgcgacgacggcgaccgcgccactgaaaccggacgagggcagggcctggtcgatgaacaatttggtcaggctgatcttggtcgcatcccacagcggcagcgccgcccccgcagctgccagcaccgtgcggtaaagctggccctgcgcaacgtaggtcaggccctgcaagacgaccgccactagcagccagcctggttcggcctgctggaacacgcgctcgaaatgaccggcatcggacagttgcaggacgccgactaaaagcgctccgagcatggctgcccccagcagccatgaaaaccagaccaggcgcgaggcatgttcggtcgggcgggaggagtcgtccatgtggcgcatgcggcgcacctcgatacaggagatcaacaggtgctcatgctctccctgccgacgcttgggggcattgacaccgatcacgcggcttgcgcggatcctgcagcaaggctagatggcaaccaggcgttgtacaccctcgctcgccatgttctcgccacgcccttgctggatgatctcgccgcggctcatcaccaggtactggtcggccagttcggcggcaaaatcatagaactgctctaccagcaggatcgccatgtcgccgcgggcagcaagcttcttgatcaccgcgccgatctccttgatcaccgagggctggatgccttcggtgggttcgtcgaggatcagcagtcgcggattgctcgccagcgcccggccgatggccagttgctgctgttggccgccggagaggtcgccgccgcggcggtgcttcatctctttgagcaccgggaacagctcgtagatgaactcgggcacttccttggcctctttggcgctgaaacgcgacagccccatcagcaggttttcctcgacggtcagtcgcccgaagatttcgcgcccctgcggcacgtaggcgataccggcgtgtacgcgctggtgcggtttgaagccggtgatcggcttgccttcccagctcaccgcgccttccttggcggggatcaggcccatcaggcatttgagcagggtggtcttgccgacgccgttgcgcccgagcaggcaggtgacttcgccgatccgggcgtcgaatgaaaggccgcggaggatatggctgccgccgtagtattggtggagtttttcgacttggagcatggctcgattcctgttttttgggctgcaggcctcaggcctcaggctgcaagctgcaggctaaaagcgctgttgcatgcggcctatggcctgaagcctgaagccagggcgcgtcagcgccccagatacacctcaatcacccgctcatcgttctgcacggtttcgagcgaaccctcggccagcacctgaccctggtgcagcacggtgacgtggtcggcgatggtgtcgacgaagcccatgtcatgctcgaccaccatcagcgagtgtttgcgcgccaggctcttgaacaattcggcggtgaactcggtttcggcgtcggtcatgccggccaccggctcgtcgagcagcaacaactgtgggttctgcatcagcaacatgccgatttcgaggaactgcttctggccgtgggagagcagcccggccgggcgattgcgcgaggtttccaagcgtatggtggcgagcacttcatcgatgcgatccttctgctcgccgttgagtttggccttcaggctggcccatacggatttatcggttttctgcgccagctccaggttctcgaacaccgagagcgcctcgaacaccgtgggcttctggaacttgcgaccgatgccggactgggcgatttccacttcgctcatgcgcgtcaggtcgagcgtgtcgccgaagaacgcggtgccgctgtcagggcgggtcttgccggtgatgacgtccatcatggtggtcttgccggcgccgttggggccgatgatgcagcgcagttcgccgacgccgatgtagagactgaggttggtgagcgccttgaagccgtcgaagctgacgttgatgtcttcgaggctgaggatggtcccgtgacgggtatccaggccttcagtcttcacgcggcccaggccgatggcatcgcgaccactgccgctggcgtcgatcaattcgggtacggctgcggttttcattggtcgcccctccgcttcatgaggccgatgacgcctttcggcaggtacagggtgacgatgatgaacaacgcgccgagggcgaacagccagtactcggggaaggccacggtgaaccagctcttcatgccgttgacgatgccggcgccgagcaatgggccgatcagggtgccgcgcccgcccagggcgacccagacggcggcttcgatggattgcgtcggtgccatttcgctggggttgatgatccctacctgcggcacatagagcgcgccggccaggccgcagagcacggccgacagcgtccagatgaacagcttgtagccgcgcggatcgtagccgcagaacatcaggcgattctccgcatcgcgcagcgccgtcagcacccggccgaacttgctgcgcgccagacgccagccgagcagcagactgccagcgagcagcacgacggtggcgaagaacagcgtggcgcgggtagccggggcggagatcgagaagccgaggatggtcttgaaatcggtgaagccgttgttgccgccgaagccggtttcgttacggaagaacagcagcatgccggcaaaggtcagcgcctgggtcatgatcgagaagtacacgcccttgatccgcgaacggaaggcaaagaagccgaaggcgaaggctagcagccccggcgccagcaccaccaggcacattgcccagagaaagctcgaggtgccgtaccagtaccagggcagctcggtccaggcgagaaagctcatgaacgccggcagcccgtcgcccgcgctttcacgcatcaagtacatgcccatggcgtaaccgcccagggcaaagaacaggccatggccgagggacagcaagccggcgtagccccaaaccagatccagcgccaacgcgacgatggcgtagcagaggatcttgccgactagggtcagggtgtaggccgagacgtggaaggcgttgtccgcgggcagcagatgcagcaggggcatggccagcagaatgacgagcacgatgccgagggcgacggcagtgagttgcggcccggctttctgtgcggcggtgagggtgagtggctggttcatgcgcagctctcctgtaggagcgatcttgctcgcgaatgcgggatcggtgtccgcgaggaattttgtagggcgggtgaaacccgccgaacgtgctgaacggcgactgcgtattgacgggttgcacccgccctacggttgctgaggggccgactgggcagcgattcgcggacaagtccgctcccacaaagggcgcgaagcggacggggagaagttttcaatcgatcaccctccctttcagcgcaaacaggccctgcgggcgcttctggatgaacaggatgatcagcgcgaggatgaggatcttgcccagcacggcgccgatctgcggttcgaggatcttgttggcgatgccgaggccgaaggctgcgaagatgctgccggccagctggccgacgccgccgagcaccacgacgaggaaggaatcgatgatgtagccctggccgaggtcggggccgacgttgccgatctggctcagcgcaacaccgccgagcccggcgatgccggagcccagcccgaaggccagcatgtcgatgcgcccggtcggcacgccgcagcaggcggccatgttgcggttctgggtcacggcgcgcacgttcaggcccaggcgcgtcttgttcagcaacagccaggtcagcagcactacgaacagcgcaaagccgatgatcaccatgcggttgtagggcagcaccaggttcggcagaacctgcagaccgccggaaagccagcccgggttggcgacctcgacgttctgcgcgccgaacaatacgcgcaccagttggatcaggatcaggctgatgccccaggtcgccagcagggtttccagtgggcgaccgtagaggtgtcggatcacagtgcgttccagcgccataccgaccgcggcggtgacgaagaaggccaccggcagcgcgaccagtggatagaacgccagggcgtccggcatgagtcgcgccatcaatacctgcaccatgtaggtggcgtaggcgccgagcatcagcatttcgccgtgggccatgttgatcaccccgagcaggccgaaggtgatcgccaggcccagcgcggcgagtagcaggatgctgcccaggctcaagccgctaaaggcctggccgagtagctcgccgatcaacagtttgcgtttgacctgggccaggctggtttccgccgctttgcgcacgccggcatcggtctcggcctcatcggcgagcaggttttccaggcgcacgcgcgccagtggcgccccggtttcgccgagcagacgcacggcagcgaggcgcacggtcgggtcctcggcgctgagttgcaggttggcgagtgtcagggtgagggcttcgcgtacagccggattgtcctcggcgtcgaggcgctgttgcaggagcgggagctgctccggttggccgctgcgctgcaggcgcttggcggcggcgaggcgctgcgccgggtcttcggcgaacagctgatggctggccagtgctgtgttgagcaagccgcgcagacggttgttcaggcgcagcttcttcggcgtcccgacgggcgcggcgtcgccttcgagggcgcgatagctatcaccttcctcgacgagcggcgttttgttcttgtcgatcgccacacgattggcgcgcagtgcttcgatcagtgccaggcgctcgggggccggcgcgatggcccagtcctccagcagcttggcctgtttggccgggctcgccttggcgtaatcggctgcgtccccggcctgggctgcgcagggcagagccagcagaagcagcaagcatattcggtacagggcagtgttcatttaggtattccccagggaccccggtgctctcttggtggagcttgcggtggtcgacaggtggatgaaaaaggcgtcggcgcttcatccatcgttacagcgctgtagggtgggtgggccgaacgacgttccgcttcagccacccgaaacgccattggtgggctgaacaggatggcgtattcgttcagcctccagcgctttcggtcagttgctcttgacggcgtaatccggcttcttgtcgttacccgggatataggggctccacggctgcgcgcggaccgggctttcggtttcccagaccaccgagaactgaccgtcgtcctggacttcgccgatcatcaccggcttgtgcaggtggtgatttttctcgtccatggtcagggtgtagccgctcggcgcttcgaaggtctggccggccagcgcatcgcgcaccttgccaacgtccgtggtgccggccttctcgaccgcctgcgcccacatgtggatgcccacgtaggtggcttccatcgggtcgtttgtcaccgccttgtcggcgcccggcaggttcttcgccttggcataagccttccacttgctgacgaaggcttcgttgaccggattttccaccgactggaagtagttccaggccgccaggtgccccaccagcgctttggtgtcgataccgcgcagttcttcctcaccgaccgagaaggccacgaccggaacgtcagtggcttccaggccctggttggccagctccttgtagaacggcacgttggagtcgccattgatggtcgagaccacggcggtcttgccgccggcggagaacttcttgatgttggcgacgatggtctggtaatcgctgtgaccgaaaggcgtgtagacctcttcgatgttcgactccggcacacccttgctgataaggaaggcgcgcaggatcttgttcgtggtgcgcgggtagacgtagtcggtgccgagcaggaagaagcgctcggcactgccgccgtcttcgctcatcagatactcgacggccgggatcgcctgctggtttggcgcggcgccggtgtagaagacgttgggcgacagctcttcaccttcgtactggacggggtagaacagcaggccgtcgagctcttcatagaccggcagcacggatttgcgcgacaccgatgtccagcagccgaaggttaccgcgaccttgtcctgggtcagcagctggcggcccttctcggcgaacagcggccaattggacgccgggtcgacgaccaccggctcgagctgcttgccgagcacgccgcccttggcgttgatctcgtcgatggtcatcagcgccatgtctttcagcgaggtttccgagatggccatggtgccggacagcgaatgcaggatgccgaccttgatggtctcggcggcctgcagggtgaacgggaacagaccgctgagcatcagggcactagcggcgagggtggacttgatcagaggacggcgtttcatggtgggcggctccttggctgtccatgcgcaacggtggggttggtccatcgggactgcaggcgctatcgcagcatccgtgccaatttcattggagcgctctggcacaaggcttcgcggtcattcgtctgagtgagccctcacgtgggctaggctccgacgggtacgaaaacggggcggccgacgcgacgtggggcagcgcgctgcacgcatgtggtgcgaaacgattttcgcgattcgccgatggcgagccggcgaagccagggcggctgcttgcggggatcgccttgtcgccctagcatgaccggcccgctcaggagccctcatgtcgcgtcgtccccgcccaccgcgcaccgccgcagcgcgtgcccagccccgtcgagtcgccaaggcgccgcctgccgaaccgcgcctgctgctgttgaacaagccgttcgacgtactcacgcagttcaacgatgccgacggccgcgccacgctaaaggatttcgtcccggttccgggcgtgtacccggccgggcgattggatcgcgacagcgagggcctgttgctgctgaccaataacgggcaattgcaggcgcggatcgccgatcccaagcacaagctggcgaagacctattgggtacaggttgaaggcgaggcgagcgaggagcagctgcaacgtctgcgcgagggcgtcgaactcaacgacggcatgacgctgcctgcggaggctcgggcgttggatgagcccgagttatggccacgaaatccacctgtgcgctttcgcaagagcgtgccgacctgctggcttgaactggtgatcagagaagggcgtaaccgtcaggtccggcggatgaccgccgcggtcgggctgccgacgttgcggctggtgcgggtcagaatcgggccctggtcgctggacggcttgcagccaggcgagtggcgggaagtgccggcgcacttgtgaggcgccggccactgtgcagcatcagtgcgggatgccctgcgaaacttcgatgatgtagccgatgatcggcttggcgaggaaggcgaacaggcaaaggccaaggcccaggaacaggatcgccgtaccgaggcggccagctttggatttcttggccaggtcccagatgatgaacgccatgaaggccataaggccgccgaccaggacgatcatcatccacttttcgaatacttcaggttccatcgagcgctccgcgtggctagtaacgacaacggctatgacaacgggcgggctattgttggctgagcagggctcgtttttaagacgcgcggggcatagcaaggcggcgccgagtatacgccaccaggccgccgcgcggcctgtcagcggcatccggtctcagttacgcaggtgttccagcggcagctccgtgctcgacgatacctgccgcaggacgaagctcgaccgcacgctcgacaccccttcgatgcgggtcagagtgcccagcaggaaggcctggtagtgctccatatccggcaccaccaccttgagctggtagtcggcatccatgccggtcacgaggctgcactccagcacctccgggcatttgccgatcactccttcgaaatgctcgaagcgctccggtgtgtgccgatccatgccgatgagtacataggcggtcagggtcaggccaagtttcttgcgatccagcagtgccacctggcgggcgatatagccgtcgtcctcgagctgcttcacccgccgcgagcagggcgagggcgacaggccgatgcgctcggcgaggtcctggttggatatgcgtgcgtcgtgctgcaattcgtggaggatgcgcaggtcgtagcgatcaagtttgctcatttggtttggtccggctggtcttattgcgctgaatgatgtgttgttgcgtatggattgcgcaagtggtggttgtttgagcaatattcgcaaacatctagcgtcgggcagggcgtaagctttatccaacttcagcccccggcagaaaggacacggcacgcgacccccgccgtgacctccgaacgccttaccaaggtcgacggtccgggcccccgacgctcacgaggcgccgcgcgaagaagccgttaccatcggcccaacgaatcgaagagaccacgccccggcgtggtctttttcgttttggggttttgtttggtgttaagtgggtggggctgttcctagccgctgtgtattgcgctgttgtgggagcggcctcggccgcgaagcttttaagctttggtctgagtggtacacccgcttgccggggtggctgggacattagtttcgccctgctgggcgagtcactttttcttgagtggccaagaaaaagtaaccaaaaagaaggccacccctgcatccgggttttgctgcgcaaaactcccctcgctacggcgttgctccgggggtcgtcgcgaagggccatccctggcccatcgctcctcgctcggcatccatgcctcgcgaccccctacgcaacgcctacgctcggcctcctgaagggggctcgggaccgagtcgtctggacgtttttgaacagcaacaaagcgccttcctcatttaatggcgaacagtctcgtaggatggatgcaaccatcaagctcttgcgatgggcttcgcccatcctacgttctaaagcccactgcacaatgcttaggcttttgatatctggcacagaccaacagacgccgccgaacgcccctttcaggaggccgaatggaatcgctgcgcagaggggcgagcggcatggatgccgcgagaggactaggcgtccccccgatgaagggccatggatggcccttgcgcggcgaccctcggagtagcgatggagtgagggaagtcgagcgaagcgagacccggatgcaggggcaagcgtttttggttacttttgaggggccggccatccgggcgtttggaaaaagtgactcgcccagcagggcgaaaccaatgcctcatccaacccggccaacaggcatggccacatggaccagagcccaaaaagcttcgcggccaaggccgctcccacaacagcgcacaatgcaggcactcgtcgccagcgtcaccccttcgacctgaccacctcaagcggatcagcatgtaccagcacctcggctcgggggtacttggcgtgtatcgccgcctcgacctgatcgcacaaggcatgcgcctcgatcaacggcagctgccccggcaactccagatgcatctgcacgaaccagcgggtcccagagacgcgggtgcgcaggtcgtggcaaccgaccacaccgggcactgcgcaggccagctggtgcatgtcctcactgatctccggaggcagctcggtatccatcagcaccgcaccggcctcgcggacgatgctcagcgcgctccagaagatgtagagcgcgatggcaacgccgaagaccgcatccaggcgctcccagccatagccggccagcaccagcgcgaccaggatgctggtattgagcaacaagtccgaacggtaatgcagggaatcggcacggatcgccgtggagccggtttcacgcaccacatggcgctggtacatcaatagcgccacggtcagcgccagcgacagcagcatgaccgcgatgcccagtgccggtgcgcccaatggctcggggtgcagcatgcggtcgacgccttgcacgcaaacgagaatcgcactgaccgaaatgaaggccccctgaccaaggccggccagggcctcggctttgccgtgaccgtagcgatggtcttcatcggcgggacgcagcgagtagtgcaccgccagcagattgagcagcgaggcggcgccgtccagcaaggaatcggtgaggccggccagcaggctcaccgaaccgctcagccaccaggcaagcgccttgctggcagccagcgtcagcgccacggccaacgccagccgcgtggcgcggcgcatcagccttgcgtgttcggcgctgacgcctttgcgctcgcgggtgtgttgcatcaggcagcaggccgcagaccgaaggaggcgagctgctcgacactgccgttgtgctggatcaggcgcgggtcgtccagtggcaggctgcgaccggtttcggcctcgatgatggccttgagcttggccagatcgactacgccatcggcgccgatggcttcctgcagtttttccggtgccatggagtagctgttgtcgggcaggtagatcgcgccggtggcgaagtcgatgccgaaggcgatcaggccggggatgaggtagaacagcaggccgaccgcgttgagcacggcgacggcggggtcgatgcggccatcgatctggccacggcggtcggggtagaacagcgtgccgcaggccgccagctgagtgaacagggagacggccagcacgccgccgatgacacgggaacgagtacgcatttggacctccgggaaaagtggcgcaactatacaagggctgcaccagagctgcgtgatgttttctcgacatcagaccgccttctgcgccccggtgttcaaggggctgtgcagcgcctgcgaggggcgttcagccggtcgaacctggcttgcggcgggcaagtgatccgtagggtggatgacgcgtcacccatccaccgtaccgggcgctgacgggttggaaaaacgtcatccgctaacagcccgccagcatctttatcgtcccctataatgccgcgctcgaatccggaatcctcatgttgctcctacccattgatgaagccctgccggcgctgcgccaggccctgctaacccgagacgaggcggtgctcgaagcgccgcccggcgccggcaagaccacccgcgtaccgctggcgttgctggacgaggcgtggctggaggggcaatcgatcctgatgctcgaaccgcggcgtctggctgctcgcgccgcagccgaacggctggccagcgaactgggcgagaaggttggcgaaaccgtcggctatcgcatccggctcgaaagcaaggtcggaccgaatacccgtatcgaagtggtcaccgaaggcattcttgcgcgccgcttgcaggacgatccgacgctcgatggcgttgggctggtgatcttcgacgaattccacgagcgcagtctggatgccgatctggccctggcgctcaccctcaacgcgcgcgtgctgctgcgcgatgagccgctcaaactgttgctgatgtccgccacgctggaaggcgcccggctgtcgagcctgctcgacgatgcgccggtggtgcgcagtgaagggcgcatgtatccggtcacgcagcgctggggacggccgttccaggccggcgagcgcatcgagccgcgagtggtgcagaccgtccttcaggcgttggacgaggaacccggcagcgtgctggtcttcttgcccgggcaggctgaaatccgccgcgtgaacgatgccctggccgagcagttggcaggtcgcggcgaggtgatgctgtgcccgctgcacggcgaactggagctggccgcccagcgcgcggccatcgaaccggcgcctgccggcaagcgcaaggtggtgttggcgaccaacatcgccgagaccagcctgaccatcgaaggcgtgcgggtggtcgtcgatgcggggctggcacgagtgccgcggttcgatccgggcagcggcatgacccgcctggaaacccgccgcatctcgcgcgcctcggcaacccagcgcgccgggcgtgccggacgactggagcctggcgcctgctatcggctgtggtccgaagaccagcatgcgcaactggccgcctatggcgacgcggaaatccttcaagccgatctggccggcgtggcgttgcaactggcgcgctggggcgtcgaaccggacgagctggtctggttggacgtgccgcccgctgctgcatacgcccaggcgcaggatctgctccagcgcctcggcgcgctcagccgcaacgtccgtggtggttggcaattgactgcacacggccaggccatggccgagctgccggcgcacccgcgtatcgctcatctgttgttgcgtggccatgcgttggggcttgcatccctggcggccgatctcgctgcctttctggtcgagcgtgacattcagcagggcggtcagcgtggcggggcggacatctccacgcgtctcgggctgctcgacggcagcgcgggccggcacgctggggcgcagcgggtgcgccagctagcacggcagtttcgcggtctgctgcgggggccggcgggtgctgctccggccaatgctttggatcatcgttggcacggcgcgttgctggccttcgcctatcccgatcgaatcgcccgccagcggcgcgagggcggcggcgagtatcggctggccaatggtcgcgcggcggtattcggcgagccggacgcattgatgaaggagccctggctggtgatcgccgagctgggcagtcgtcagggccagcgcgaagagcgcatctaccgtgccgctgcgctggaccctgcactgttcgaggatgtgctggccgagcaggtcagccaacgcgacgagctggaatgggacgagcgcgaaggcgtgctgcgggccgagcggcagcggcgcgtcggtgagctggtgcttggtcgcgagcccttgccagggctggatgacgaagcgcgcggtcgtgcgctgctcgggttggttcgtcgcaaaggcctggagctgctgccctggacgccggagctgcgccagtggcaggcgcggattgcgttgctccggcagctcgatctggaatccggcggggcgagcggctggccggacgtcagcgacggggcgctcctggcgcggctggacgagtggctgctgccttacctgggcaaggtcacgcgactcgcccacttcgcccagctggatttgcgcagcatgctcgccacgctgctgccgtggccgctgccccagcgtctcgaagaactcgcgccaaccgccatcaccgtgccttccgggtcgcggatacgactcgactacagcgagtcgccaccggtgctggcggtacgcctgcaggaactcttcgggctggccgatacgccacgcatcgccagcggccgtcaggtggtcaagctgcacctgctgtcaccggctcgccggcctgtgcaggtgacccaggatctggccagcttctggaccaatacctacctcgaggtgaagaaagacctcaagggccgctatcccaaacattactggccagacgatccactgatcgccgaaccgacggcgcgcgccaagcctcgcggaacatgagcctcgcgggacatgagccgcgcgggacgtgaatcttgcctcggtagcctccgtgcatcgatcccatggtggcatgcacctgcctgccttattccggcaggctcacgtcttcacccgctgccaccagctcggcataggcgcgatccagtgcatcgatgatggttctgctgccatcggcatgacgcgagacgatgaaacgaacggcgagcttctgtagctcgacgtgctgcagttcgggcatcgccagacgctgcacggcctggttgatcggcacggcgtagtcgagcagatagtcggcgcggcgatgcttgagcatttccagcgccgaggcgtggttgctggtgcgatgcagacggatctccagtttcgggtccgacagcatccggttcacctgtggccagtagttgtagccgccgatgacgatcacgccccgcttgcgcaggctttccggcaccttgggcgttggcgtgtcggcccggtagtaaaggttgagactgatctgcgcgagggtttcacggccttcgagggtatcggcctgtagctccggtttgcccggtgcgccgggccacaggtcgattgttccgtccttcagggcggcgtacaggcgcgcgctgggcagcccgcgaaaccgtgcctgatagccggcatgttcgaggacacggcgggtaaggtccaccaccggtcccttcggccgtccttgcgagtcgctgtagatggccgggggaaagtcatagtagccaacggtcagcgtacgtggcggctcagcgccggtcgcagcccagcaaggccctgccagggccgccatgagcggtgtccagagtaaaggcttcaaggtaattctctgccccttgtggttaggcacgcccaagcatggccgccacgggcgggactgtccatatggctgccgtctcggatcggggcggcttgccgacaagctgactatgctgaagtcggggcgcgtcggtcgtggcaggcgatgcctttttcaacctcggatggagcagtgcatgtatcgcaaggtattcgccagcaaggtgttcgatcgcaaggtagtgctgattaccggaggttgtgccggcatcggacgcgcgctggctgaacgcatggcccaggccggtgcgcgcgttgtgatcctcgacctcgagcagaacgccctcgatgggctggtgcagcacctggtcgaccatcacaacgcggatgcgctgggcctgcgctgcgatgtctcggatgcggaggcggtgcggcgggccgttgcgctggtggtcgagcgattcggcggcatcgacgtgctgatcaacaatgcgggtatcacccaccgcagtcgcgtcgccgaaaccagcctgggggtgttcgagcggatcatggcggtcaacttctacggcgcgctgcattgcacccaggctgccctgccgagcctgatcgcacgcggcgggcagatcatcgtgctcagctcgctgtcgcaatatgccccggttcccgatcgtggcgcctacaacgccagcaagcatgcgctgcatgggctgttcgaaaccctgcgcagcgagcttgccgacaccgatgtcaacgtcatgctggtctgtcccggttacaccgcgaccgatctgcgcaagaacgtactggttggcgacggctccaccgcaccgcaaccggtgctgaccgtgggccgcgtggcgtcgccgcaggacgtcgccgagtcgatctaccagggcgccctgaagcggcgccggctgctggtgctgtccaatctcgactggcgcgcgcggctggtggcgcgctgcttcccgcgattgttcgaacacctgctgttgccacggctggccggcgctcgcgcgtcaaccggcgccggttaagcggtcgaggcgctgccgtagagtttctccatcaactccaggtcccagtaggcggcttcgatcttgtgaccgtcgaggtcgcgcacgaagcagccgtagtagggcgcgccgtattcttcgcgggggcccggtgcgccttcatccgttgctccggcgtccagggcggcacgatggaaggcgtcgaccgatgccttgtcggcggcgaagaagccgatatgagtgccgttgccgaccgaggccggctggccgtctatcggcgtctgcagccagaactcgggatattcgcggccccaggcaatcgctcccgggtgggccatgatgcgcttgcagcccagggtcgcgaggacctggtcatagaaacctgcggcttgctcgaaacggttactgccgagggatacgtgggacaggatgctggggttctgatcggccatggcgacgcgctccggatggatggagccaccaagcctagccgggcggatcgcgatgcgccgccccggcagtcaacttctttcgtcgaggtcgatggccggctcgctgcagagcatgaagcagcggaacagcaccacggtcgccagcagttgcagcagcccgacggcgctgtcgaccagcacgctcaacggcccgggagacgcgggctcggcccagaattgcgccgcgagccaggcttcgagcagccacaacggcaacagcaccgcgaggatgcagccgagcagcaggaggaaatgcccgcgtgtctgcaggaagctctgcttcaaagcctccaacggcgtcatgccgcgcagcaccaacaggtactcggcgaaggcaatcttgaccatcacccacaggcccggcagcacgaacagcgaagcgccgagcatgatcagcagcgtgcccagcccagccagtacagccatcctcggccatagcggcacggcgcgtttcagcacttcacgtggcggcggcgaatatccacggctgcgggcgtccagatacaggatcagcgcgccgatgtagagcgggtagaacaccatgccgatcagcaggtcctgcgccgctggcgcatcctcgccgaacagccggctgacggccaggcgggtacagctttccagcacgatcaatggcaggcagagccgtgcgatcgacagcaggttgcgggaatagaagaaccaggcgtcacggaggatggacaggacattcatcgcaggcggaacaactctcgaagaacagggcaggcactttagcccaagcaaccgatcggcgacatgcgtgacattgccgtccatactgatcgccctttcaccgctcgggtcgccgcgtgaagaagatcgccctgtttgccgatgtacagaacctctactacacggtgcgccaggcccacggctgccacttcaactatgccgcgctgtgggccgaggtgagcgcccgtggcgagattgtcgaggcgtatgcctacgccatcgaccggggcgacgccaagcaacagcagttccagcagatcctgcgcaacctgggcttcacggtgcagctcaaaccctatatccagcgcagcgatggttccgccaagggcgactgggatgtcggcatcaccatcgatgtgctggatgccgcaccgcgtgtcgacgaagtggtgctggcgtcgggcgacggtgacttcgacttgctgctcgaccgcgtgcgcgccggcggcgccgaggcaacggtctatggcgcgcccggcctgaccgccaactcgctggttcgcgctgccagccgttacgtgccgatcgaaggcgcattgctgctgcgctagcgctaagcggcttcaggcttgaagcgatggactttggactgtcatggcttttcggctgcagtgaaaacgacatgaccccctacgcttggcctccagcctccagcctccagcgcccagcgtcctttccgagtaaactgcgcacctcgttttcgtactcccggttttcgccatgaccttcgcctccctgggcctgatcgatccgctgctgcgcaccctcgaatcgctcgattacaccaagccgacgccggtccaggccaaggccatccccgctgtgctcaagggtcgcgacctgatggctgcggcgcagactggcaccggcaagaccgccggtttcgccttgccgctgctgcagcgcctgctccaggaaggtccgcaggtaaccagcaactcgacccgcgcgctggtgctggtgccgacccgtgaactggccgagcaggtgcacgagagctttcgcacctacgggcagcatctgccgctgcgcagctatgcggtctacggcggggtcagcctcaatccgcagatgatggccctgcgcaagggcgtcgacgtgctggtggccacacctggccggctgctggatctttaccggcagaacgccgtgaagttcgctcaggtacagacgctggtgctggacgaggccgaccgcatgctcgacctgggcttttccgaagagctggacgcgctgttcagtgctctgccgaaaaagcgccagacgttgttgttctccgccaccttctccgacgcgatccggcagatggcgcagaagctgctgcgcgatccgctgtccatcgaagtcagcccgcgcaacgccgccgccaagaccgtaaaacaatggctggtgccggtggacaagaagcgcaagtccgaactgttcatgcatctgctggccgacacgcgctggggtcaggtgctggtgttcgtcaagacgcgcaagggggtcgatcagctggtggatgagttgcaagctgccggcatagccagcgatgcgattcacggtgacaagccacaggcctcacggctgcgcgcgctggaacgcttcaaggccggcgaagtgcaggttctggtggccaccgatgtggcggcgcgcgggttggatatccacgacctgccgcaggtggtcaacttcgacctgccgatcgtcgccgaggactacgtgcatcgcatcggtcgtacgggccgcgccggcgcctctggcgaggcggtttcgctggtggccgccgatgaagtggatcagttggcggccatcgaaaccctgatcggccaggttctgccacgtcacgacgagccggggttcgttcccgaccaccgcgtgccgaccacgcagcccggcgggcagatcatcaagaaaccgaaaaaaccgaagcagcccaaggccggcgccgcaaagggccgcgttcacctgggcaactggttcgatgaaagcgagaagcccaacgccaaaccgatccgcaaggtgccgagcctgggcggagggaagccggcgaaaaagcgctagctgaaacggcgttcgccggtcggctggggcttgcgctagggccgaggcgcgccgaaagcagcgccttccacagcaacccgcacagaggcaagagaggtggttttgtcgaataccgataccgagctgcacgaactcagcggcaaaagcatctgggccggtttcaaacagctgacacccatatcgctgttcgtcatcgtttttggcctggcgttcggcctcgcggcgacgcaggcggggttgggcaacgactccagcttgctgatgagcgcactggtcttcgccggcgcttcgcagttcgcatcgctcgaactgtggggcgcgcaggttccggtgttgccgctggtggtcaccgtgtttgccgtcaatgcccgacacctgctgatgggggctacgctgtacccctatctgcggcatttgcccccggccaagcgctatgcggtcatgttcgtcgtttcggatgccaattgggccatgtccatgcaggcgttcggtcagggcaagccggggttgggcatcctgttcggcggcgggttggcgctctggtccttctgggtattaggcacctggctggggctgtatttcggcagtgccattcatgacccggtcagtttggggctggacatggtcatgggctgtttcctcctggccatggtcgtgggcggcaagaagaacctgcggatgctggtcgtctggatcgtcgcgggctgcgcgtcgatgctggcgtactggtacctgccggccaacagccatgtggtggtcggtgcgcttgccggcggcctgctcggggcgctgtggatggaggagtcgaagtgacgttggaaaccgcgggttccggtgcgctggtcatcatcctgatcatggccgtggtcactctggtgacgcgctggggtggggtgttcgtcatgtcgttcgtacccatcaaccgccggaccgagcaattcatcagtgcgatgtccggttcggtgctggtggccttgctgacgccgatggcggtgaatggggataacggtgcgcgcctggcgtttctggtgacagcggtgaccatgctgctgctcaagaagccgctgccggcgattgctgccgggatcatcgccgtagcgctgttccggcagctttgagcgtgctttcgcagtgagtgcgcctcagccgcgcgacgggcgatccgctagccagcgcagcatgccggctgctgccgcacgtccgctggcaaaacaggcggtgagcagatagccgcccgtgggtgcttcccaatcgagcatttctccggcacagaacacgccgggtagccgatgcagcatcaatccgtgatccagttcttcgaacggcacccctccggcgctgctgattgcttcgtccagcggtcgtgcgcgccgcagaacgatcggcagcgccttgatcaggttggccagacgcggcgcgtcatcgaaggcgtccgccggcgccagctcccggagcaacgcggctttgacgccgtcgaggccgagctggcgcttgaggtgcttggccatcgattgcgaaccacggggcttggccagcgcacgaccgatcttttccagcgaatggtcggggagcaggtccagctggaccgtcgcgctgccattttgctcgatcgcctggcggatctcggccgacagcgcgtagaccaggctgccttcgatgccgctggcggtgatgacgaattcgcccttgcggggtgcactgccggcgagcgcgaggctgacggttttcagcggcgcgccggcgaatctttcctgcaaatgctcgctccagccgtccacctcgaagccgcaattggccggtcgcaatggcgagagggcaatgccgtgctcggccagcagcgcgacccaggcgccgtcggagcccaggcgcgcccagctgccgccgcccagagcgagcaagatggcatcggcgctgacggacagctcgccatccggcccttgcaggcgcaggcggctgtcgtcgtcccagcccagccaacggtggcgtgtatgaatctgcacgccggcatcgcgtagccgtctcagccaggcccgcagcagcggggcggccttcatgtcggcgggaaacacacggccggagctgccgacgaaggtagcgatgcccagcccatgtatccactcacgcagctgttcggggccgaacgcctcgagcaacggacgcaacgcctgggcgcgttcgcggtagcgcgccacgaacggatcgaacgcttcggaatgggtgatgttcatcccgccgacgccggccagcagaaacttgcggccaaccgagggcatggcgtcgtagaggtcgaccgcaacaccggcctggctcagcacgtcggcagccatcagcccggcggggccgccaccgatgatggcgatgcgggaaggcatagggttcggaagcatgggtcaggcctggcggtgcgaggccggcattgtagcgaatgccgtttgcaaacatcgatcatgcggcgcacgggtacgggcgagtcgcagccatgcagcgccttcgccggcataagccgtggcgtctatggatgcgcacgcaggttgaggtcgttcagtgcagtccgtggcgccgccacgcctcggcggcgctgaaatgcagctgggcatggcgccgggcgagcagggcgcggtccttgtcgtagccgccgccgatcactccgaccaccgggatgtcccgcccaaggcaatgctcgatgactgcgctatcgcgcatcgccaggccatcatcgctgaggttcagcaagcccagcgcatcgtcacgatgaacatccacgccggcgtcgtagatcaccaggtccggctggtacagcggcagcaggtagttcagcgtgtcgtcgaccaccttcaggtagtcggcgtcgccaaggccgggcgtgagcccgatatcccagtcgctgcgtgccttgcgcaccgggaagttcttttcgcaatgcagcgacacggtcaccgcatctggcacctgttcgaggatgcgcgccgtgccgtcgccctgatgcacgtcgcaatcgaagatcaggacccggccgacacggccgctttccagcagcgaaagcgcgatgaccgccaggtcattgaaaatacagaatcccgaggcatgatcatggtgggcgtgatgggtgccaccggccagatgacaagccaacccgtgtcgcagcgccatgtcggcggccaacagcgagccgccgaccgcgcgcacggtgcgctgggccagttgcgggctccagggcaggcctagccgacgcagctcttcgcggctcatgtcgccgctgcagtagcgctcgacgtaggtgcggtcatgggcgagcgcgagcagctcgcgtggacaggcttcggggcgcaacagggcctggtcggtggtcaaaccgctggcgaccagatgatcgcgcagcaaccggaacttctccatcgggaagcggtgtcccggtggcagcggcgggctgtagtcgtcatggaatatcaggggtagcggcatcggtcggcgcctgaatggtcagtcgcgagtatgcagagccggcagcagccgccacaaggaaacgacatggagcaaccgatggaacgcatcgaactggatacgccgcggctgcggttgcgcggctggcacgacgccgacctcgacccattggctaacatgtgcgccgacccacaggtaatgcgttatttcccggcgccgctgtcgcgtgacgagtgtgcggtggcgatggcgcgttgtcggattcacttcgtccgccatggcttcggcttctgggcgctggagcgcaaggacgacggttgcttcatcggctttaccgggctggcctggagccggttgcagcaaccgttctgcccagccgtcgagatcggctggcggctggctcgcgagtactggcgccaggggttggcccgggaagccgcgcaggcgtccctggcctgcgccttcgagcgcctgcaactgccggcagtcgtggcctacacggctgcggtcaacgatccatcccggcaactgatgcgcgcgctgggaatgcgccacgaccacggaggcgacttcgaacatccggacctgcccggcgggcacgtgttgcgcactcacgtcctgtaccggatgacgcgcgacgattggttcgatacccgacgttaggcgcaatcagtggagcggatactgcggaatccgtaccattgcatgcctgccccgtgcccgcatgaatataggaactgcaccatgaccgataccctagacacgctggtgagcctgctgtcgctggaacgcatcgaggaaaacctgttccgtggcgccagccaggatctgggttttccgcagctgttcggcggtcaggtggtcggccaggcgctgtccgccgccagccagacggtggcgccggagcgccatgtgcattccatgcacggctatttcctccgtcccggcgattcgcaccagccggtggtctacgacgtcgaccgggtccgcgatggtggcagtttcaccacccgccgggtcagcgccatccagaagggccagaccatcttcacctgcagcgcctcgttccaggccgacgagaccggctacgaacatcagttgccgatgccggatgtcgaaggtccggagaatctgctcagcgagtgggagctgctgcacaagctgacaccgctggtgccgccgcgcgtagcggaaaaactgcgccggcccaagcccatcgagattcgcccggtgaccctgcaggacccgataaatccgcagcccatcgagccgattcgccacatctggttccgcgccgatggttcgctgccggacaacccggcgctgcacaaatacctgatggcctatgcctcggacttcagcttcattggcaccgcgttgcagccgcacggggtgagctcgtggagcaagttcatccagctggccagcctcgatcactccatctggttccaccgcgaagtgcgtgccgacgactggctgctctacaccatggacagcccctgggccggcaacgcccgtggtttcgcccgcggcagcatcttcaatcgcgccggtcagttggtcgcctcggtggcccaggaagggctgattcgcgtacgtgaggactggaagtgagcctggccgatgcacggcactgggtgttcgacatggacggcaccctgaccattgccgtgcacgactttccggcgatcaagcgggccctggatattcccccggacgacgacatcctccatcacctcgctgcgctgccggctgatgaggctgcaggcaagcgggcctggttgctcgagcatgagcgtgaactggcttatgccgcgacggcagcagccggtgcccgtgagttgctgcacgcgctgcgtgagcgcggttgccgcctcggcgtcctgacccgcaacgcccacgagctggcactggtcacgctgcaggcggtgggaatgggcgactacttcgctagcgacgatatcctcggccgcgacgaagcgccgccgaagcctgaccctggcggcctgctgcacctggcggaccgctggtccgtggcgccgagcgaactggtgatggtcggcgactaccgcttcgacctggaatgcgccaaagcggcgggcgcgcgaagcgtgttggtcaacctgccggaaaatctgtggccggagctgaccgatctgcatgcccgcgattgcctgcaactgcgcgacatgctggcggggtagcccaggctgcacataatggcgccacgcacgggctgctttcgtaggagccccgaccccggggcgaagcttctggctctgagcgggccggcaagctgcctccgccgcgggtcgcgcctcccacagaaaaagcgggccacctgcatcaggaggcgccacgcacgggctgctttcgtgggagccccgaccccggggcgaagcttctggctttaagcgggccggcaagctgtattcgccgcgggtcgcgcctcccacaagaaaagcgtgccagctgcataaggggacgccacgcacgggctgcttcgtgggagccccgaccccggggcgaagcttttggcgttaaaagcggccccggaagctgttcgccgcgggtcgcgcctcccacagaaaacgcgtgccagttgcataaggagacgccacgcacggactgctttcgtgggaggcccgccctcggggcgaagcttttagctttttgccgtctgaccggttcgtccagtctgccggctcaatacagcgcttggtaaagcttgcggcggtaggtcgtgaccagcgggtgatcgctgcccaacaggtcgaacacctgcagcagcgtcttgtgtggcagcccgtcggcgtagctccggttgcgcacgaacagcttgagcaggccatcgagtgctgcttcgtgctgctggcgagcgagttgttgcacggccaactggtaggccgcttcgtcatcctcggggttctgcgccaggcggctcttcaggtcggcgacttccggcaggtcgttggcctggcgcaggaaggtcagctgcgcgcgggcgccggccagcgcctgcttgtgttcgtctcccttgactgcattgagcaccgtttcggcctcgcccagttcgccgcgctcggccaggcagcgggcatagaggatcagcgcggcggggttctcgttgtcttcggccagcaactgcttgagttgctcttccgcatcgccgatacggccctcggcgaacagcgcctgggccgcttccagccggtcggcttcgggtgccggtggggcctgtacgtggggttgcagcatggcgcgaatggccgactcgggctgggcgccggcgaacccgtcgaccggctggctgtccttgaacagcaccacggtgggtaggctgcggacgccgaagcgtgccaccacctcctgctcgatgtcgcagttgaccttggccagcacgagctcgccctgatactcctcggtgatcttcgccagcagcggcatcagtgccttgcacggcgcgcaccactcggcccagaagtccaccaggaccggcttgtggaaggagttttccagcaccagttgctcgaagttggcgctggtaacgtcgaagatataaggcgtctggctcatggcgttctctaggttggggcgtgcgaatcaggcgtgcatgttaagtggggctgcgcccaggcgaaagcaagtcctcgcgcgttgtcacgggttggtctatgtttgcgccgcccgggccgcagcgcgctgtcggttcgaggcaaaaccctttcctagaccggtgcggcgtttgcagtcgcgcgtcatatggagcttcgcagatgtcctttctctccgatttccgggagcgctacctcgtgcgcttctggtcacccttgcctgccctggtggccctgggtgtcgcttccgcctactacttcgcgatcaccggcaccttctgggccgtcacgggtgagttcacccggtggggcggccacgtgctcgcctggctgggctaccagccgcaggaatggagttacttcaagatcctcggcctgtcgggcacgccgctcgaccgcgttgatggggtgatgatcatcggcatgctgctcggcgcgctatgcaccgcgttgtgggcgaacaacgtcagcctgcgctggccgaccagcaagcgcaggctgttgcagggcctggtgggcggcatcgtcgccggcttcggcgcacgcctggcgatgggctgcaacctggcggcgttctttaccggtatcccgatgttttcgctgcatgcctgggcattcatgctggccacggtaggcggtgcctggatcggcgtgaagatctgcctgctgccgcttctgcgcacaccgctcaaggtgggcagccaggccagttcgctgttcggcgacccgcaagcgacccagcgtcgtgccgcgcggcaggctcggatcggtgtcgcggtcgcggcgctggcgctggtgttcatggcctggcgtttcgacacttcgatggtgctgggcatggccgtgttgttcgggctggtctttggcgggctgatcgaacgtgcgcagatctgtttcaccagcgctgcgcgtgatctctggaccaccggtcgcacccgcgccgcctacggcatcctgctgggcatggcggtcgcctgcatcggcacctttggcgcgatcgccctgggcgccagcccgaagatcttctggatgggccccaacgccatcatcggtggcgtgctgttcggcatcggcatcgtcgtggctggcggttgcgagacgggctggatgtaccgcgccatggaaggtcaggtgcatttctgggtggtcggcatcggtaatgtcatcggcggcacgctggtcgcggtctactgggacgagctcggcacctcgctggcgttgccctatccgaaggtcaacctgctgcagacgttcggccccgccaacggtctgctgctgaccctggtcgggctggccatcgccatgctgctggtgcacctcaatgcccgtcgtttccaagcccgtcgttcccaatcaaccaggagtactgcccgtgagccaggccacaccgaatctatcgcttgatctgcgcggcgagcattgcccgtacaacgccatcgccacgctggaaaccctggcgaccatgcaacccggccaactgctggaagtggtgaccgactgttcgcagtcggtgcatggcataccggaagacacccgggccaagggctacgaatgccaggtcgaacagcacggttcgctgtttcgcttcctgatccgcatccccgcctagtggttcaccccgagggcgcctcgccggcggcctcggcaccggccaacggccaactgcccagttcgcgatatcgcaccccgtcgcgcgtgttctccgacaggtagagcacgaagcgatcggctgcccagctgaacgtcggcggcgtgcagcgtggtggcagttcggcctggcgggccagggtcaggtgcggcaggaaggggcggctgtcgagcacgatgccctgcgcgccgagagcctggccaagactcgtcgccagctgcagcagggcagcgggtggcgactgtggccgaaggcagacgaaccccttgccgagggcgatcaggccgtcgagcttcagctcgaaggacggtgcctcgatagccgcggccagatgtttcagggcctccaggcgagtcgccggctgcgcgccgaggaaggccagggtcaggtgaaagttatccggtacgaccttgcgcccgctcgggagctgcccgtcgcgccactgtgcgatggcggcagcctgttcgggcgggcagggcaaggcgaagaacagtcgcagcgtatcggcatgggtctgcatgggcatccctcccgcttcgtcggttcaggcccgcgtggcgtggtacaggctgacccggcgaaactccgcgggttcggccaggtcgggccaggtgcaggcatcgagtaccgccagccgttcgtaggccgggtgctggaagtcgcgcacccgcgaatcggccaccagcaccgccttgccacggctgaggaactggtcgagcagcggcaggttggcgcgatcgtagagcacatccgcgacgatgatcaggtcgtagcggtcgggctcggcgaagaagtcttgcgagtagcctagctgcaccccgttaagggcggcgttgatccgacaggacgccagcgcggtcgggtcgaggtcgcaggccaccacctcggcggcgcccgccttggccgcggcgatggccgcgacgccggagccggcgccgaagtccagcacccgcttgccacgcacccattccggacgttcggccagccagcgcgccaggaccaggccgctggcccagcagaacgaccaatagggtggctcatcgaggatgcggcgggtttcttcggggctgaaggcgcgcgtcatattgtccgggtcgatcagccagaggcggatgtccgtgcctggcaaggtggcgatgccgagctgcgcatcgccgagcagccgggacagccccacctgcagttcatcgggcgcggtcatggcgccggaaccagccgcagcgggcccagtgactgattggccgggctggtcacctgcactgccggcaaacgcatgatcagctgaccggagcgggtgacgcggccacgcagctcgacctgctggtctgccggaaacttctcggcgttgaatttgagaatgaacggcaactcgctgccacgcccctgcaactgcaggctgctcagcaaacggtccggctggtcgcgccgattgacctccagcagcgccagctccacttcactgttggccggcacgccgatgaggctgccatgcaattcatgcaggacgctggtcgcctgtggcggctcctcgaaggtgaccggtgcggaggggcgctgggtttcctggctcgagcaggcggccagcagcaacaaaagggcgggaacgacaaaggggcgtaacggcacggacggcctcctcgagggcggtgaatgcgcgcctgtatagcagcaatgccgtcaatttgtcttgccgacgggatgcgctaccatggctctcccgacgtctgacagctctagcccatgcattgtcccttctgtggtgcacacgacaccaaagtcatcgattcgcgcctggtggccgaaggcgatcaggtgcgccgtcgccgtgaatgcctcgcctgcggtgagcgcttcaccacgttcgagaccgccgagctggtgatgccgcggctgatcaagcaggacggcagtcgccagcccttcgacgaggaaaagctgcgtgccggcatgcagcgcgcgctggaaaagcgtccggtgagtgtcgagcgtctggaagaggccatcgcccacatcaagcacaagctgcgcgccaccggcgagcgggaaatcaaatcgcgtgtgctcggcgagctggtgatggtcgagctgcagaagctcgacgaggtggcctatatccgcttcgcttccgtctatcgccgcttccaggacctcaacgagttccgcgaagagatcgaacggctgtctcgcgagccggccaagaccgaatgagcgccgacgatcacgcctggatggcgcgcgcgcttcgattggcgcgcaaggggctatattcgacgcatcccaatccgcgtgtcggctgcgtcatcgtcaaggatggtgaactgatcggtgagggctggcacgtgcgtgccggagagccgcatgccgaggtgcatgccttgcgtcaggcgggtgagcgcgctcgcggtgctaccgcctacgtcacccttgaaccctgcagtcactacgggcgcacgccgccctgtgccgaggcgctggtccaggctggggtaggccgcgtggttgcggccatgcaggatccgaatccacaagtggctgggcgcggactcgcgctgttgcgcagtgtggggatcgaggtggccagcggcgtgctggagtccgaggctcgcgcgctcaactgcggctttatcaagcgcatggaaacggggttgccgtatctgcgcgccaagctggcgatgagcctcgatgggcgtaccgcgatggccagcggcgagagtcagtggatcaccggcccggccgcgcgcgccgaggtgcagcgcctgcgtgcgcagtcgagcgtggtgctgacgggcgccgacacggtgctgatggaccatgcacggctgaccgtgcgcgccgcggagctgtgtctggatgacgagctgacagcactggcgatgcagcgccaaccgctacgcgtattgatcgacgggcggctgcgcgtgccgttggatgcgccttttttccaggccgggcctgcactcgtcgtgggccacgatgacgggacggccgcgcgttatcggtcggcgggccacgagctgctggcgataccgggcgcggcagagcgggtcgacctgcatggcgtgttgcgcgagctggccgcgcgcggcaccaacgaggtgctgctcgaagcggggccacgtctggctggcgccttcgccgccctcggtctgatcgacgagtatcagatcttcgtcgccgccaaattcctcggctcgaccgcgcgaccgctgctcgacctgccgttggagcggatgagcgaagcgcgcgaactgcgcatcgccgatatccgggccgtcggcgacgattggaagatcgtcgccgtaccgcgcgcataactgaggttgcatcagttcactggccgcagcccgttgtgatcgagcttggcgcgtcgcttgttggcgcccagcagccatcttgccagcaggctttcatggtgcggattaccgaaatggaacagggcggtggcacgtagcatggccggatcgcattcatcgttggcgtgcaggctacggtagccgcaaaacaggtacaggttgcccggtaccagcttcagccggatcggccggagccagccacgtcgcaccgcgaaggcgaccagcttctggctggcggtgttatgcagcacggccttctcgaccacattgcgcagggcattgaagcggacgcgtcgcacattgggaaagatgatcaggtcgccacagtgcgtgcccaccgtcgggatgaacaacggcagcagcgcagtcactgccgtcgcatcgaaatgatagaagtgcgactgcttgaggccgctgcgtccctgcagacagcgaagcactggaaagatctgctcggccgcggccggctcctttccggtctgcaggcgatacagtgccgccatcgtgtccttgagtgcggtagacagcgccagccccgcgatcatgctgccgcccagcgcctcgattccatgtatggcgaagtattcgccgccctgaatggcggcttgctgagcgacgaaggcgcggcccagttcgagctgctcgggtgagatgaaatgctcgatgaccgtgaagccatgttggtcgatctcggcagcctgctcggccgccgatgcttgcatagccgtaacctctgacatacctgtccctcatggcacatgtgaaggctcggagcgttcgtcctgatcgtgcccaggcctgcgcgggaggggatcgccaaatacgagtggatcctggctcggcgtgtcggtacgaagaaatgcgggagtgacgttccttcctgatcgtcctgcgttgcgtcgggccaacatcgaaggggccgatgcgatgggtatggacaaacaagcgcaacgcgagttgcgtgagtgttaaaaaatgtttctgtgccgcgaagcgcagccaggcggtcgtttccaggctgcagaaaggccttatctatggtaaaaactgcgccgggcctgaaaagggcccacgttctcagggcggggtgcgattccccaccggcggtaatggcgcagctgatgttgaaagcgtagcgagcgcggtgcaggcaaggcgtgatacgacgagaaagcgacgtttaccctggtaaatgagcctttcgaggaggcgcgcaacgcagcctgcgctgggcacagtcgctttcaatcgcgtctagcccgcgagcgcttgtcttcgacaaggtcagcagacccggtgtgattccggggccgacggtatagtccggatgagagagagcgggatgcctcgacgggcgcctttcgtgcgcgcgtccactccctatcgatctgcagcgccctgttttatccaaaacaggagttcgtcatatgcaccgcttcaatagccttccacgggaggccgcatgttcacaggaataatcgagtccatcggtaccatccgcgccatgacgccaaaaggcggcgacgtgcgtgtgctggtcgagaccggcaagctggatctgtcagacgtcaagctcggcgacagcatcgcggtcaatggcgtttgcctgaccgctgtcgagctgccgggcaacggcttctgggccgatgtcagccgcgagacactggcgcgcaccgccttcgtcgacctcaaggcgggcagccgggtcaatctggagaaggcgctgacgccgaccagccgcctcggcgggcatctggtcagtggtcacgtcgatggtgtcggcgaggtggtggcgcgcgaggaaaatgcccgcgccgtgcagttccgtatccgcgccccgcgcgagctggccaagtacatcgcgctcaagggctcgatcaccgtcgacggcaccagcctgacggtcaactcggtcaacggtgccgagttcgaactcaccatcgttccgcacaccctggccgaaaccatcatggtcgactaccgccccgggcggcaggtaaatctggaagtggacctgctggcgcgttacctcgagcgcctgctgatgggtgacaaggccgccgaacccaatgcctcgggcctgaccgaaagcttcctggccgaacacggctacctgaacaagtgagattgccagcatggccctgaacaccgctgaagaactgatcgaagacatccgcgccggcaagatggtcatcctcatggatgacgaggaccgcgagaacgagggcgacatcatcgtcgcctccgaatgcgtgaccgccgagcacatcaacttcatggcccgcttcgcccgtggcctgatctgcatgccgatgactcgcgagcgctgcgaaaccctgcagctgccactgatggcgccgcgcaacggctccggcttcggcaccaagttcaccgtctccatcgaggcggccgaaggtgtcaccactggcatttccgcggccgaccgcgcgcgtaccgtgcaggccgccgtggccaggaatgcagtagccgaagacatcgtcagccccggccatatcttcccgctgatggcccagcctggcggcgtcctggcgcgtgccggtcacaccgaggcggcctgcgatctggcgcgcatggccggtttcgagccatcgggggtgatctgcgaaatcatgaacgatgacggcaccatggcgcgccgtcccgaactggaactctttgccgaacagcacgggttgaagatcggcaccatcgccgacctgatccactatcggatgattcacgagcgcaccgtcgagcgggtttctgagcagccgctggacaccgagctgggccagttcactctggtgacctaccgcgacgaagtcgaagacaccgtgcacatggcgctcacccgcggtgagatatcgccggaaaacccgaccctggtgcgcgtgcacaacatggagccgctgcgtgacctgctgatggtcaccgtgccggggcgctggagcctgcgtgcggcgatgagcgaagtggccaaggccggcagtggcgtggttctgctgctgggcaatccgctgaccgggccgcagttgctggcccagctcaatcgccagcattcgccgagcccggcgacctacagcacggtaggcgccggttcgcagattctacgcgacctcggtgtgcgcaagatgcgcctgatgagttcgccgatgaagttcaatgcaatatccggcttcgatctggaagttgtagaatacctgcccgctgagtgagggctgccgcgctactgcgcttggacatactgcgttgaaaacaggctcggcttgctcatttacaacagtaaactccgccgcctcgcctgttttcgccttgtctgtcctgcgctcgctacgcgctgctccaccgggctgcctgaaagcccactagctctttaacgctaaatgagattgtttccatgacactgaagaccatcgaaggtaccttcatcgccccgcagggcaagttcgccctggtcgttggccgcttcaacagcttcgttgtcgagagcctggtgagcggcgccgtcgatgcgctggtgcgccacggcatcgcggaagacgccatcaccatcatccgtgccccgggtgctttcgagatcccgctggtggcgcagaaagtcgctcagcaaggcgagtacgacgcgatcatcgccctcggcgcggtcatccgtggtggcactccgcatttcgaatacgtagctggcgaatgcaccaagggcctgtcgcaggtttccatggaattcggcgtgccggtcgcattcggtgtattgactgtcgactccatcgaacaggctatcgagcgctccggcaccaaagccggtaacaagggcgccgaagctgcactgtccgcactggaaatggtgagtctgctggcgcagctggaggccaagtgagccttaatcacgacgacagtcaggacgccccgcagccaaaggccaagggcaagatcgcgacgcgccgtgtcgcgcgcagcctggcgatgcaggcgctgtatcagtggcacatggcgggccagagcctcaacgaaatcgaggcgcagtttcgcgtcgacaacgatttttccggggtcgacggcagctatttccatgagctgctgaccggcgtggctcgcgccaagaccgaagtcgacggcgccatcgtgccgcatctcgatcgtccgctcgaagaactcgacccggtggaactggccgtgctgcgcctgtccacctacgagctgatgcaccgcatcgacgtaccgtaccgggtggtgatcaacgaaggtatcgagctggccaaggtgttcggcgccaccgacgggcacaagttcgtcaacggcgtgctggacaagctggcacctagcctgcgcagtgccgaggtcggcgcgcacaagcgctgagcctggtctgcctgatgggtgagttcgagctgatccgccattacttcgcctccgccgcttgtgccagggctggcggcgaagtcgtgttgggcatcggcgatgattgcgccttgctatccgttcctgtcggggagcagctgacgatatcgacagacacgctggtcgccggcgtgcatttccccgatccttgcgatccctatctgcttggccagcgtgccttggccgtctcgaccagcgatctcgccgggatgggcgcgacgcccatcggttttaccctggcgctgaccattccatacgtggacgccgattggctggccgagttcgctcgtggcctcgatgcaatggcggccggctgcgacatgcgcctgatcggcggtgataccacgcgcggcccgttgagcatgacgctgacggtcttcggccacgtaccgaccggtgcggcgttgttgcgcagcggcgcgcaacccggtgacctgctttgtgtgggcggtgcgctgggcgatgcggccggtgcattaccgattgtgctcggtgagcggccgggcgattcgcctgaaggggcggcgctgctgcgtcgctactggacgccacagccgcagctctccctcggccaggcattgcgtggcagggccacggcggcgctggatatatccgatgggctgctggctgactgcgggcatatcgcccgcgcctcgggcgtctcgctgcaaatcgagcaagctcggctgccattgtcggatgcgctacgggctttcgccggtgaagacgcgctgcagtgcgccctggcgggtggtgatgactatctgctggcattcacgctgcctgccgagcacctgtcagagctgctcgaagaaggctggccgattcacgtgatcggccgggccgtcgcaggcgagggtgtcgagctggtcgatgcgagcggcaacgcggtgaccaccggtgacctgggttataaccatttccgcaactgagcggcgcgtttcgctcgccaaaaacaagaggaacaccgcttgaccgattccctgcagcctggcgccgaaccgactccgcattcggtctggagcaatccctggcacaaccttgcgttcggtttcggctccggcacattgcccaaggcgcccggcacctggggctcgctggtggcgctggcattcgtgccgctgtggcagctgctgcctggctggggctacggcgcgttgatactcgccagcatgctgttcggcatctggctgtgcggcaaggtcgctcaggatcttggcgtgcacgatcatgagggcattgtctgggacgagttcgccggtatctggatcaccttctggttggtgccggcgggctggtattggttgctgctcggattcgtcgtgttccgcctgctggatattctcaaaccgtggccgatcagctgggtcgatcggcatgttcacggtggcctgggcatcatgctcgatgacatcctcgccggcgtcgccgcctgcggcgtcatgcatatcgcggtgcgattgctcggctgacccgtcttgtcggttcgtgctgtgcgccggatcgctgcaacatccaggggctcgtgaaaaaatgcgatccgccctgagctaaggagccgccgctgatgcgccccgttgccttgttattcgccacgaccctgtcgatcctggcgttcaccgccctggcgtccccgcgtgtgcaggtggtcggcctgtttcccggtgctgccgtgttgaatgtcgatggtcagcgcaagctggtacgggtcggtcagacgggccccggaggcgtcgaagtgatcagtgccgactcgaaaggcgcggtgcttcgggtggatggcgtcgagcgagcttatgggctttcccgggagctgagcgcgggttttgccgagcctgagcgccggcagctaagcattgcccaggggcagggcggccactactggatagcgggttccatcaacgggcagcctgtgcagtttctcgtcgataccggcgccacgtcggtcgcgatcaacgaaatccaggctcgtcgcctcggcatcgactatcgggtcgatggccggcagatggtcgtcagcaccgcaagcggtacagccaaggcctggcgcgtcagtctcaatagcgtgaaagtcggcgcgatcgacgtgctcggggtcgaagccgtcgtggtggaaggcggctcacctaccgatgcgctgcttggcatgagctttctcagccgcgtcagctggcgcgaggagcagggcgtcctgaaactggaatcgaagttctagacccgcccgttcgcggcatggattggcggcactgcgcgacatcttccgatacagcttgtcgcgggactgctgttacaatatccgcttttctgccttctggagtttctccggtgtctgtcgtgttcgtcgccgcttccaaactgccgacgccgttcggtgtgttcaccatgcatggttttctcgatcaggacactggcaaggaacatgtcgtactgacgctgggcgatgttgccgacggcaagcccgtattgggtcgtctgcattccgagtgcctgacgggtgacgccctgttcagcttgcgctgcgattgcggttttcagctggaggccgcactgcgcgcgattgccgaagaaggccgtggcgcattgctctatctgcgccaggaaggccgcggtatcggtctgctgaacaagatccgcgcctatgagttgcaggacggcggcgccgataccgtcgaggccaacgagcgtctcggcttcgcgccggatatgcgcgactacgcgatctgcctgccgatgctagagcacctgggcatcgccgagatcaagctgatgaccaacaacccgcgcaaggtgaaggccctgcaaggcttcggtatccgcgtcgccgagcgcatgccgctgcagatcgcgcacaacccgcacaaccgcaagtacctcgccacaaaggccggcaagctcggccacatgctcggcgaaattcaccagggtgaagccgagcagtcgtgaaccgcacggccgcccgtcgccagttgaagctcgacggctggtactacctgctgttcatcgtcgcgcccgtgctcgtcagcagccagcttccccagctggctggccgcttcggtgagccgctcgccctgccgttattccttgtcgggctcgccgcactgtttctcaatctgccccgtttcacggcctacaagcacgcgttgatcgcgactgaaaatggcctggacaccgctgccgaagcgtcttcttgggcggcgttacgcaccgtgcggctacgggctttgcggaccgcggctttaccggcgtggcttgcggcactcggtgcgccgctgggcctcgagcctgtcgcgcaggtgctgctggtctccggtagcctcgtgctgctgttgctctaccgcattccgcgccaactgcagtgatgcgtgcgctgctgctggtcgtcgcgctattgatctcgcctttgctggcggcggcggagcgggtggtcagcctggcgccctcgcttagcgaaatcatgctggaactgaatgcagacgatctgctggtcggcgtgctcgacggcggcgagcggccggaggcgctggctggcttgccgtccgtgggacggctcggtcagctggaaatggaaagccttctggcgttgcagccgacactggtattgctctggccggacagcatcagccaggcgcaacgtgaacagctcacgcagttcgccattccggtgctggttgcacaaccgaggtcgctggctcagctgtccgagcaattcgcgctgatcggcgaacggattgggcggggcgagcaggggcgggagctcgaacgagcgttcaagcaggggctggatcggctgcgtcggcattaccaccgcgagcgtccgctgacggtgttctatcagatctggaatcgcccgctgtacaccctcggcggtcggcagatcatcagcgaggccatcgaagtctgcggcggtcgcaacgtgttcgctgacctccaactgcccgcgcctcaggtcagcatcgagtccgtgctgtcgcgcaatcccgaggtgatcctcgccggcagcggcgcccagctgtccgaatggaaagcctggccgcagctggcggcggtgcacaagggccagctatggggagtgccggacaaggggctggagcggccgagcttccagatgctgggcgcgatcgggaagctctgtgaggtgatggggcgggccactccctgagatggctgcgcgcggttagagcgctggcgtccagatgaccgcgagcagtccggtgcggccctgattgcggtaaccgtagacactatccatgtcgccgaaggtgcgctggtacagcgcctggtggtaatccttgtctagcacgttttccagcttggcttcccaacgtagttctggactggcttgccagttggtgcgcaggtcgagcaccgcatagcccggaatcgtgcttcgctcggattggaagctcgcattgaagccgccgtcatcgaagcgttggctaaaggcctgccaggtcgcgccaacgccaaattcgccgaactgtcgatccagatccaggctcagcgtgcgcttggcgcggcgttgcaacacgcgaccgctgtcccggtcgcgagggtcgatgatgctcagcccgagatgggtctgccagcccagcacctctcgggccacgctggtctcgaaaccgttgatgcgagcgtggtttacgttttccatctggcgaccgccccaagcgatcatgtcttcgacatcggtgcgataaagtgacgcctcgagttgagtaccgctgaaatcggcgcgccattgcagctcgtaggtcttcgaagtttccggcttcaggtccggattgggcccccaggtcggcggtgcgtagagatcggtgaacgtcggcgcgcgaaagccttcaccataactgagtatccagcgctgcgattggcctgttggcaggctgaaggctgcgttccagctattgtggctgccgaattgctcgttgtcgtcatggcgcaggcccagctccgtgccgaagtcgtcgccctgatagctgtgctgggcgaagaaggccaggttgttgcggctgtcttcctgataggccgtggtggcgtccaggcgatcctcgtaccagtcgctgccgaggctcagttgatggttttcgttcagtcgcaggcggttggtccaggcggccgagtgacgggtggtttccagcaggccgtcattgaaggccgagcccaccgcacggtttcggtcgaaactgcgccccaactccagccggctgttccagactgtgctcaactgcccgtccagatagccgctatagctgctgagccggaactcgtcttggggttggcccggagcgaattcgttggcgtcgtcgtattcgttctcgccgcgctgatcgttaaggctcagaccagctttccagctggcgtcgaactggtgatcgagcttcaggtgcagggctttggtgcgctggccgtcgtcgtcgcggtcggcgccacgctcgtcccgggtgatatcgaagccctcgcgctcgtcgaggctagctccgaggttgaagcgggtttgctgggtaccgccagagaaattcaggctgcgctggtaggtgtggtcgctacccgcggccaggcgtacttccgggttcaggcccggctcaccgccgcgagtgaaaatctggatgacgccgccaatggcgtcggcgccgtaaagcgacgagcgcgggccgcgaatgacttcgacacgctcgatgttgtcgatggccagatagtcgaggcgggcgaaaccactcgttgccgaagagattcgctggccgtccagcaacaccaaggtctgcgccgtgccggtaccgcgcagcgacagtgacggcaggccaccagcgctaccgatctgcacgcccggtactcggcgaagcagctcgggcaggctccgcgcctgcaaacgctcaatgtcggcgcgggtgaataccgcgttggctgcagtggcctgcgcgcgcggttcggcttggcgcgccgaggtgacgagcatgttcggcaactgatagctgtcattcatgttcgtatcggcaaatgcctgggaggccggcagcagcgccacagccaaggcaagacgggtcagtttcatcagaatcaatcctcaaaagaacagcgcttttgaggagggcaggaacaagcgcgaggacaaagacagccagccgcgcttgacggtgctgccctccgcaacaccagtcgaatccgccaggccggtctccgggctttcgacgcgcacccggctcgccttcccatgcgatgcacagtggcggttgagcggggcggtgatccggcggatcacggtcgattaccgttgcgggggcagcgccggccttgctcttgcgagcgcaccggcttcccgtttaatgcggaccttgcggtcgtgcacaccgggcggataagaaatcgcgggaaccttaagggctgtccttgagaattacaagcaaagcactgatggccgagcgcagcctgcgcgacgggagtacggtcgccgtggtccagtcgggtgtgagctggcgaggcgaggagggccacccgacctcagccaactgatcgagacgcttatgtacgacgcttggatgccagcgcggcgcctgaaaggagatctgcgccgcgacaagcgccgtcagagctgggccagtctggcgcgaatcgccgcttcgataccggcggcatcgaggccgcactccttcagcatttcgccgggcttggcgtgctcgacgtagtagtccggcaagcccaggtgaaggatcggctcctggcggttttcagcggcgaggaattcgccgacggcactgccggccccgcccatgatgctgttttcctcgacggtcaccagcaggtcgtggctgtctgccatctggcttaccagtgcttcgtccagcggcttgacgaagcgcatgtcgaccacggtggcatcgagcgcttcaccgacttgcagcgcttcggccagttgcacaccgaagaccagcaaggcgacccgctgaccatcggcggcgctgccctggcggcgcaccacgcccttgccgatttccagcggctcgagcccgggttcgagcgtcgcattcgggcccatgccgcgcgggtaacgcaccgccgcggggccttcgaagtgatagccggtggtgagcatgcggcgcatctcgttctcgtcgcttggcgtcatcaccagcatgccggggatgcagcgcagataagacaggtcgaagctgccggcatgggtcggaccgtcttcgccgaccaggccggcacggtcgatggcgaacagcacgtcgaggttctgcaccgcgacgtcatggatcagttgatcgtaggcacgttgcaggaatgtcgagtagatcgccaccaccggcttggcgccctcgcaggccatgccggcggccagcgtcaccgcatgctgctcggcgatggctacgtcgaaataccggtccggatagcgctcactgaaatcgatcaggtcagagccttccttcatcgccggcgtgatgccggtcaggcgcgggtcggcagcggccatgtcgcacagccattggccgaacacgttggagtacttcgggccgctgggcttcttcggtgcggccggcgcgccgacgggctccagtttgctgatcgcatgccaggtgatggggtcggcttcagccggggcgaagcctttgcccttcttggtcaccacatgcaggaattgggggccggccaggtcgcgcatgttgcgcagcgtggcgataagggtcggcaggtcgtggccgtcgatggggccgatgtagttccagcccagctcctcgaacagggtgccgggaaccagcatgcccttggcgtattcctcggtgcgacgggcgatctcccaggcgccgggcaggcgcgaaaggaccttcttgctgccttcgcgcatgctcgaataggtacgactggaaaggatcttggccaggtagttggacaggccgccgacgttgcgcgagatcgacatgtcgttatcgttgagcaccaccagcatgtcggcgccgacttcgggggcgtggttcagcgcctcgaacgccatgccggcggtgagtgcgccgtcaccgatcacggcgatggatttgcgctttttgccctgcagacgcgcggcgatggccatgcccagggcagcgctgatcgaggtgctggagtggccgacgccaaaggtgtcgtattcgctctcgctgcgacgcgggaaggcggcgaggccgtccttctggcgcaggctggccatgcgctcgcggcgtccggtgaggatcttgtgcggataggcctgatggcccacgtcccacaccagccggtctttcggcgtgtcgtagacgtaatgcagggcgatggtcagctcgatcacgccgaggccggcaccgaagtgcccgccggtccggccgacgctgtaaagcaggtcctgccgcagttcgttggcgagttcttcaagttccgcttcgcccagccggcgcagctgctcgggagtggccgcgcgatctagaacgggcgtcgcagggcggacccgaggaatctcatggaacgtcttgggcatcgggcgaatcgttttggctgaaaaaagagccgcagtttacctgatggtaactacgagaagaatgatccaggcatcaacggtcatcgtcgtgcgggtaagcgagctggcctggtggttcggattcagctgcggcgctcgacgatgaagcgggccaactggcgcaacggctcggcggcgtcgccgaagggcgtaacggcttcgagcgccgtatcgcgcagctcaagcgcgtaggccttggccgcgtccatgcccagcaatgccgggtaggtgggcttgtcacgcgcaatatcggcaccctgatgcttgcccagcgtggcggtgtcgctttccacgtcgaggatgtcgtcctgtacctggaaggccaggccgatggcttgtgcatagcactgcagggcggcgagcgtgtcggcatcggcgcgcccgctggcgagggcgccgaggcgcacgctggcttcgatcagtgcgccggtcttgtgccggtgcatcagttccagcgcgttgcggtcgagcttcacgccgaccgagcccaggtcgatggcctgcccgccaaccataccggacgggccggcggcgcgcgcgagactgacgagcatgtccaggcgcagtgcagggtccgcagggttgagtgcctcgctggccagcgcttcgaaggcgaggctttgcaggccgtcgccggcaaggatcgcgcaggcctcgtcgaaggccttgtgtgtggtcggctggccgcggcgcagatcgtcgtcgtccatggccggtagatcgtcgtgcaccagcgaataggcatggatcagctcgaccgcgcaggccgcgccatcggcttgagcactgtcgccctcgagcgcttcgcaggcggcgtagaccagcagcgggcgcacgcgcttgccgccattcatgacgctgtagcgcatggcctggtagaggcgttcgagttgcgggcggggcggggtgaagagcgtatcgaggcagccgtcgacgcgcttctggcagcgctgctggtagtcgccaatcatgcgtcgggatccacctcgaagggtgcttcctgcagcttgccgtcacgctcgagcaggatctgcaccttctgttcggcctggctgagtgcggcctggcagtcgcgagtcaggccgataccctgctcgaagcaggtcagcgaatcctccagcgacagctcgccactttccaggcgctcgaccagttgctgcaactcggcgagggattgttcgaaatcgagggcgactttcttgcgggccatggcggaacctgttctgtgcggctgctctgaaacgggcgcgacactagcagagctggaaggcattagccataagccgtccgggctagcgccgctcagcgccagtatatggcctggaagtaatagagcgtcatgctggcgccgaccacgatgacgaagacgcgcagccaactggccggcagcttcttgctcagcgcgccaccggcatagccgccgagggtggtgccgatcagcaggatcgccagttcgtacaggctcacccgaccggcgatgatgaaggtggccgtggcgacactgtagataactgcggagatgaggttcttcaatgcgttggcgcgaaccagttggtgaccttcgatggagaacgccgccagctgcaggatgcccatgcctgccccgaaatagccgccgtagatggacaccaggccatgcgccgccagcgatgccggcgcatgtggcggtatcgcgctgtcgtccttgcggcgcgctgccagccagcggctcagccaggggctggcggcgaacagggcggtggcgacgagcagcagccagggaatcagcaggctgaacacatcgtcaccgctggcgagcagtagcaggccgccgatcaggccgcccagcagacctgccagcaacagtggaagcagatagcgacccagtggacgtagtgccgagcgcgccgcccaggcgcccgcgaggctggcgggccagagcgccacggcgttggtcgcgttggccgtgaccggtggcaggccggtggccagcagcgccgggaacgaaaagaaggtgccgccgccagccaaggcattcatgccgccggcggcaaaaccggcagcgatgagtaacagtatgtcgaacaggggcatcggacgggctcgcggcaaaaggacgcagattatcccttgccgctgggcttcgccaagcgcgtccagcaaatgcgccgtgcccagcgggtacggctggctggcgcattacggtggggtgtcagggctcggcgggcggccgagtgtcgtccagccgcgtgctggtgagctcgttgaggattccgcagccctgcgtcgcacggttgccgctgcagcagctgcgcagcgcctgcaactgatgctccagggcgtggaggctctccagccgcgtccggacgcgctcgagttgctcatcgatcagcaggttgatgtcgccgcagctggcgtccggctggttggaaaattccagcagccggcgaatatcggccagcccgatgtccagcgcccggcagtggcgaatgaacaccaggtgctcgagctgcctggaggagtaggcgcggtaaccattggcgccgcgctccggcgcgggcatcagcccgatcttttcgtagtagcgaatggtctcgacgtccacgccggccgcggtgctcagttcgcctatgcgcatcctgatctccttctcactgtgggccgcccaaagaaaacgggcttgaccctggagctgctccagggtgtgcaatggctccgaatatagttcaggaggcaatcccatgtcgtcgagatgctgtgattcgggctgcgcaacaccggcggtcagcccaggatttcgccgggcgttatggatcgcgctggcgatcaatctggtcatgttcgtggtggaaatcattagtggcctgcggtccggctcggtctcactgttggccgacgccattgatttcgccggggacgccgccaactacggcatcagcctggtggtgctgtcgatggggctggtctggcgctcgcgcgccgcgctgatcaaagggctgtcgatgctggcattcgggatgttcgtgttgtcccgagccggctgggccgtctatgccggcgtggtgccggagccgttgaccatgggcgtcatcggcgcgctggcgctggtcgccaacgtcgtcgtggcgctgatgctctatgcgtttcgcgagggcgactcgaacatgcgctcggtctggctatgcagccgcaacgacgccctgggcaacatcgcggtgatgatcgccgcggctggggttttcggcaccggttccggttggcctgacctcgtcgtggcgctgatcatggccagcctggcactgtctgccggctactcggtggtgcgccaggcacggcaggaactgggcacgctgcagcatcagggctgacgtcggtcagccggcgatggccgccacgaccgcaatgacgatcacgctcgtcaccgccagtccggccgcggccagcttgcctaccgtctcggaactcagacccagcgctttgtgtttggcctgagcgccgaagcggccgtcgatgcgatgcaggccctccaccggctgaaacaggttgtcgggctgctcgtcgcttgacggctcgtcggtcatctgtccgctccaggcctgcttggccatcatccgatcgagcaggccgggcatgaacatattgccgatgatcgcctggaacgaggcgcggccgagccacagctcgcgcggcgcatcggtggcggcgcggacgatggcacgcgctgccacctcgggcgtgtggatcggagggaccggctgcggtcgtttctgcatcttgttgcgtgaccagtcgaactgcggcgtgttgtgcgccggcaactggaccatggtcagccgcacccggctgttggtatggatcagttcgcagcgtagcgaatcggtgaagccgcggatggcgaacttggcggcgcagtaggccgactgcagcgggatcgcccgataggacaatgccgaacccacctgaacgatggtgccgcggttgcgcgactccatatggcgcagcgccgcgagggtgccgtggacgaagcccagataggttacctccgtcacgcgtttgaattccgccgcgctgatcttgttcaccgggccgaacaccgttgccatcgccgcgttgacccagatctcgatcggccccagctccttctcgatccgctcggctgcgcggtcgatcgcctccgcgtcggcaacatccgcggcgatcgccaggactttcgcgccggccgcttccagctcgctgcgggtatccgcgaggccctgttcgccgcgcgcaatcacggcgatgcggtagccagcctgggccagcgcgtgcgccgttgcacgccccacgccggcggtgccgccacaaatcacggcggtctgttcgcgatcggtcatctccgggctccttttctgaggctggcaggtactatcgcaacagtgcgttccagccggcataacgatggttgatcggaccgcgcggcaggctcaggccgatcaccagcgcgccggcgatcaggctgcctacggtggcggcgaacccggcgccgtcgaggagggcgggggaggcgagcagccaggctccgatcggcagattgagaaagcgcagcggccgcgcgacctcggcgaacgccagcaccgagacggtgatcagcaacgagcccatcaggtggtcgctgttggccatcgcgccttcggtgccgaagatcagccgggtgcacatcaaccagacgccgagaacgcagagcagcgccaagccccagggcagattgaccccgcgaagccccttcagcgccatcgccgacagtgcgccgtcgaactcgggcgtattgtcctcgcgcgcgccctccatggcgtcgccctgaaagaacgtcttccagaaaggcttgccgcggcgccgcgcgtccttgaggaactgccccatggcgaccagttcatccagcgcgtagggcatcattaccagcatggccaatgcctgaatcagacacagggtgcaccaggtgttaatgacgatcggctgggcgatgatgaagaagatgctcaccgcgcccagcggcaccaccaccacaccgaacgccgcgaccatccagggcatggtccgccagcgtcgcgcatcgcccatcaccgccatcagcagctcgatcatgtaggccatgacaccgacccccgcgtcggacaccggccaggcgcgggacatgtcggaggtgatgatggtttccgtgccgttgggctgggtgccgaagaagggatcccaggcgttggcggtgtgaccgagttggtaggccgccagatagcgcgccaagaggataccgatcaccgcgaggatggcgatgggcaatcgctgcagccaggtcgaggggttgtagtcccagcccggcgggaccgcggccttctgcatcatcccggacatgctcatgcccggcatcatcggcaccaatgtcgaaaaggcgatcaccagcccgccgaccaacagggcattgccatagctggccggcgacggcgtccagaacagcagcggggcgaacatcagccagaggcccatgacggtgttggcccactgcgcccaaccctttcgcttcagcgaaagcaccgagaacagcacgatcagcacgccgctgacgacgtcgttccaggtcatcagcagcgcgcgggtggccacctccggcacatcacgttcggctgccaggcgggccaggtccaggtcgctgctggaaatattcgagtaaccgaagatgaacggggcgctgaaaaaccagcagccaagcagggcgttggcaaaatggcaccacagcgtggcgaggcggcggcgctccatcatctgcatgtgtgcttccatgcccatgtccgaaggcatggctgattgccgcaaatattcgccttgatgctccatgtacctctcctcgtttcgaagtgatggctgcatgtcgcgtttgggccggtgcgagtcttcgcaaccggctgttgatcaaccgctggtctgttgaccggatgaggcgaggaggagttgcagaaaaataggtgccggccgttcacccaaggctcgtagccgttgccttcagtttcgttggcagggccgaagtagaggcttgcgcagcgaccgctatgtcgaacagtccgggtcgacggtgaaggtcttggacgaatccaccagcccgatgtcttccagcgcacgacgcccgatgagcaccggataattcatcttgtcgcggtcgttcagcgagaactgttgctcataggtccgcttgcccaggcaaactttcatcagcaccacgggccgtttctcggcgccgccggcgccgcggaccttgatgtcccgtactacctcgcgctctatgcgcttctcgactttcttgtcggtatcgacgtcttcgagctcgagcgtgaagcgcacccagtctttgccatcctttttgaaccggtcgattttctcggcatgcatcgaggaggtcagcgcgccggtatcgagcttgaatttcacggcaaccttttctggaaggatcaggcctttctcgacccagccgagcacttgcggcgaatcggccatggccggcgcgatgcaggccgatagcaccagcccggccaaaccgagcgctttgatatgcctggggcttttcgtacggagcatctttcacctcgattcgtggcaccacggcaacgatagagtcgcaggccccggatacgttcagcacacggagcgaagcgtgccgtcgcgcgtggacagcacgatcgcgcagtcgatccattgactcgccgcatcaggttcattgaaaaaaacaatcggacggctggcgcagcctgtactccatccatagggtcgcttgcgatatgtgttgaatcgccgcgaccgtttagcgaatcgaaggaggcagtcactagggaagtccaaattgagaggtgaactatgttcgtccacaacaaacggcttcaatacaccgtgcgagtggcgggcccgaatcccgggctggccaacctgatgctcgagcagttcggcggcccgcaaggcgagctcgctgccgccatgcgctatttcacccagggcgtggctgaggatgacccaggtcgtaaggacatgctcatggacatcgctaccgaggaattgagccacctcgaggtgatcggctccattgtcggcatgctcaacaagggcgccaaaggcgagctggcggagggcgtcgagaaggaagcggatctgtatcgctcgctgaccggcggcggcaatgattcgcacatcacgtcgttgctgtacggcggcggaccggcactgaccaactccggtggaatcccctggacggctgcctacgtcgacaccatcggcgagccgaccgcggacctgcgctccaatatcgcggctgaggccagggccaagatcgtctacgagcgtctgatcaacgtgaccgacgacccggggatcaaggatgcgttgaaattcctcatgacccgggaaatcgcccaccagaagtctttcgagaaggcgctgcatgccatccagcccaacttcccacagggcaagctgccgggcgaaccccaattcgccaacgtctactacaacctgtcgcagggcgaaggcgacctgcgcggcccctggaaccagggaccggagtgggaattcgtcgagtcgccacagccggctgtggatggtggggatggcaagccctcggtcgatctgagcaaggatcagcagaaggtggtgcaacagatggcggtgcggacccagtccgatgtctccgtcgaccccatgaccggagccgacctcggctcgggtgcagccgtcaagaagggcaaggcctgacggcacgggcagccggtgcggcggatacaaccgcaccggctgcttttcggctatctcgactgacgtcattcatccctgattcgacatgtctatcgtcacgccaaggtggactcatgccgcagggcgggttctcgatcatgaaggttcgattcgctcggtcaatgcgtagtcttggtctctgcttggacgatctgcagcattgtttcgacgattagcatccgaagcggcggtgcgccggtacatcctgtctccacggtctgacacagatcgctcattaaccgaggagaacagccatgacccgcatcagcgcactgcctatcgaacaaaccgccgaatccgtccgtcccgcactggagggcatcggcaaagcactgggcttcgtccccaacgcattcctcaccctggcccacgcaccgtcagccttgagtggttacttggcgttgtcgcaggcactcggacgcggcagcctgactgcccgggagcgtgaaaccatcgccctggcgacgtcgcaggtaaacggctgcgactattgcctcgccgcgcatagcctgtttgccagcaaggccggactcgatgccacggctatcggccaggcgcgcgatggtcgtctcgatgccatagcgaccctggcgcgccagatcaccgacagtcgtggcttggtgagcgatgaacagcttgccgccgcccgtgcagctggcctggatgatcgccggatcgtcgaggtcgtcgcccatgtcagcctgctgacgctgaccaactacctcaacaacctggccgacaccgaagtggactttccggctgtcacggtttgagagggttgagcattcgcttcgtgccggatgggtttgcctgatgccgtaggcccaatcttggtggcgcgctgtgcgtcgggggtcgaccgtggagctcgaacaagcgtctgcacgccacccagcgaaggcctgtcagccggcaccacgctcgtttgaggcagtgccctggaaataaaaaagccggcttgtggccggcttttcttcagtgcttcggcttacttctgataagcctcggcagctttgatgatggcggcgcgggcggcatcggcgccttcccagccttcaaccttgacccacttgcccttctcgagatccttgtagttctcgaagaagtgcttgatctgctcaatcagcagcggcggcaggtcggtgtattccttcacgtctgtgtagagctgggtcagcttgtcgtgcgggacggcgatcagcttggcgtcgccgccggcttcgtcggtcatgttcagcacgcccaccggacggcagcggatgacggagcctggggcaaccggatagggagtgacgaccagcacgtcgagcgggtcgccgtcgtcggccagggtgtgcgggatgaagccatagttcgccgggtagaacatcggcgtggccatgaagcggtcgacgaacaggcagtcggtgtcgtgatcgatttcgtatttgatcggcgcgtggttggccgggatttcgatggcgacgtagatgtcgtttggcaggtctttgccggccgggactttgctgtagctcatgaacattgctccgtggtcggccgaggcggcctggggcgaaaaaagtgggcgcgattataggcgcagtgtcgggcgttttgccatgccagcggtggcgaaccttcgcggccaggcaatgcgcgcattcgacggtcggaaatcagtgaggttccgcgtactgcgggtggctatgttgcagttgcttcaagcgcaccagcggatcctgccgatagaaggcggcgagttgcgcatggacgtcggggaaggcctcgtgcagcacgtccggcgcgctgaaaaagtactcgctggtgacggcgaagaactcggcggggttctccgcagcgtagggatcgatcgcggtgtgggcgtcgggattggcatccagcgtcctgttgagcgcgtcgtaagcgctctgcatcaccgtggcccaggtgtcgatgcgcatgttgcggtgcagtggcggcagcccgttggcgtcaccgttgagcatgtccagcttgtgcgccagctcgtggatgaccaggttgtagccttcccagccgccgctttcctgtacgcctggcagggccaggatgaccgggccttgcagccaggcttcgccgctgtgttcgccgtcccactcatgcaccacaccggccgagtcgcggtgcttttgcgggctatggaaatcgccgggatagatgacgatttcatggaagccctgataccagttcaggtcggccaggtgcagcaagggcagttgagcctgagccgccagacgcagacggtcttccagttctagctcgacatcgggcaaggcagtcagtcgcttggcgtgcagaaacagcaggctgcgttcacgcaggcgctcggtttcctccccggtcagtccgtcgaggatcggcaggctgtccagcacgcgttgccagagcgccggctcgatggcgaggcgggcgagggtgcgcttgcggcgccagtcgcgaaatgaccacatgggattgcttccagcctggggcaccgtctcggtaatgaccgtggcccgttgtgcgtgtggatcgagagtttcgcggtcaagaccgctcccacggcgcgcgcattggcttgtgggtgcggtcttgaccgcgaatgtcaggcgtctgaatgtaccgcaccgacaaccttaagcgggctgtcgagtaccggcaagcacggtaaaagagcgacgaggccgaggactggtcgcgaggtttgcgggttgcttttcgcggtcaagaccaagcatcccagtccgctcccacgggtatcagcgtctcacctcggaacggctgcggtgaaccgagccgaaaacgctccacatatgtcaactcagcaggaagttaccggctttcggtgtgccgtcgtcgaggctgagcacttccgcttcatctttcaggttcacgcctgagagctgccggcgacaggcttcacgcatcaggtggatcaggcggtgggcggcgaggttgtagctcaagccttccaggcgaatgttggagatgcaattgcggtcggcatccgtgcggccgactttcgggtcgtaagtgaaatacaggccgaggctgtccggcgaactcaggccggggcgctcgcccagcagcatcaccaccatttttgccttcagcctttcgcccacttcgtcgccgagcgcgacgcggccttgttgcaccaggctgagtggcgcgaggctccagccgtctttctgaatctgctcctcgatgcgctgcagcaacggcaggacatgacgctgaaccgccagcgcggacagcccatcggcgacaacgatcgccaggtcatagccgctcgggtgctgctgcgcatgatcgttcagtcgctcggccgactcgtcgctcaatcgccgccccaggtcagggcgctgcaggtaggtgttgcggtccccggcggcgctgcgcaagtgcaggcagcgatagccgcgctgctccagttgcgcagccagttcgtcggtgtcgagggcgaggtgaacggcgtcgcgcgcctgggcatgggcaaactggaaatccagctgggcttcggtgggcaggctggcgccggcgcggcccaaggcgatgcgcgcgggggtgagctggcgcaggtttcgccagggattgggaacatggttcattgcggctccctatcgtcaatgtgcgtagcagtggagcggacttggccgcgaagctgtgcgtggctcgttcgcggtcgagaccgctcccacgggggcggtgtgggtgtgtggctcgttggcggcccgcacacctgcgttgccccgtcatgtaattttctccaacgcccggcgaaaggcgggcggaagttgctcgctcatctgcagtcgcccgccgtcctggcgcaggatgtccatttttgccagccactcctcgaattccggtgctggcctgagcccgagactctggcgtaggtagagcgcgtcgtggaaggaggtggtctggtagttgagcatcacgtcgtcggagcccgggatgcccatgatgaagttgatgccggcggtgccgagcagggttagcagcacgtccatgtcgtcctgatcggcttcggcgtggttggtgtagcaaatgtcgcagcccatgggcacgccgagcagcttggcgcagaagtgatcctccagtccggcgcggataatttgtttgccgttgtagaggtattccgggccgatgaaaccgaccacggtattgaccagcagcggtttgaattttcgggccacggcgtaggcgcgggcttcgcaggtctgctggtcgacgccgtgatgggcattggcagatagagcgctgccctgaccggtctcgaagtacatcaggttgtcgccgaccgtgccgcgcttctgcgacaggcctgcttcgtagccttcctgcagcaccgcgaggttgatgccgaaactggcgttggccgcttcagtgccggcgatggactggaacaccaggtccagcggcgcaccgcgattgatcgcctcgatggacgtggtgacatgagtgaggatgcagccctgcgtcggaatttcgtaacgctggatgatggcgtcgagcatcttcagcagttcgcagatgccgctggtgctgtcggtggccgggttgatgccgatcaccgcatcgccgttaccgtagagcaggccatcggcgatgctggcggcgatgccggcggcttcgtcggtcgggtggttgggttgcaggcgggtggacatgcgcccgcgcaggccgatggtgttgcgaaagcggctgacgacgcggactttctgcgccaccaggatcaggtcctgcacgcgcatgatcttcgacaccgcggcgaccatctctggggtgagccccggcgccagagctttgagcgccgcctcgtcggcgtcgtcgcccagcagccagttgcggaaatcgccgacggtcaggtggctgaccggggcgaaggcgtcggcgtcgtggctgtcgatgatcagccgggtgacttcatccgtttcgtaggggatcagcgcttcgtcgagaaaacgcttgagcgggatctgcgccaggcacatctgcgcggcgacgcgctcggcatcgctgcccgccgcgacttcggcgagaaagtcgccggagcgcgccgggctggccttggccatgacctcgcgcaggctgtcgaagcgccaagtggtgccgcctacgctgtgcgtgtatcccgccatggcttatctcccgctagttcaacgatgcctcggcgttctcaatcgccgcgaattcttcttccggcgtaccggcgaccaggtggtgccgggagtagacggcgaagtaggcgatgaagatgccgtagatcaccacggcggcgatcaccacgcgggggtcgaccaagaagccggccaccaccgcgatgcacgccagcaccagcgccacgccggaagtcagcacgccgccgggcgtcttgtacggacggtgcatatccggccggcgcatgcgcaggacgatgtgcgaagccatcatcagcacgtaggagatggtggcgccgaacaccgctaccagaatcaacagatcgccctggccggtcagcgaaagcaggaagccgatgatgccgggaatcaccaatgccatcaccggcgccttgttcttgttggtcagcgacagtttgcgtggcaggtagccggctcgcgacaacgcgaagatctgccgcgaataggcgtagatgatcgagaagaagctggcgatcaaaccggccagccctaccaggttgacgaagccgctcatccaggtcgaggaaccataggcactggtcagtgcttcgaccaacggattgccggactcgaccagcgtactggagcccgcaccgccagggccgaccaagaggatcaagccggcgaaggcggccaggatcagcatggcgccgatcagcccgcggggcatgtcgcgctgcgggttcttggtttcctcggcggccagcggtacgccttcgaccgcgaggaagaaccagatcgcatagggaatcgccgcccagataccgacgtagccgtagggcagaaaactgctggctcccgcggcggtggtcggtgcgatatccagcagtttgtcgatcgagaagtgcggcaccatcgcgacgatgaagaccgccagcgccagcgcggcgaccgcggtgatgatgaacatcagcttcagcgcttcgccgacgccgaagatatggatgccgataaagatgatgtagaaggccaggtagatcgcccagccgccgatgccgaacagcgactcgcagtaggcgccgatgaacacggcgatggcggccggggcgatggcgtattcgatgaggatcgccgtaccggtgagaaagccacccagcgggccgaaggcgctacgggcgaagccatagccgccgcccgcggttgggatcatcgacgaaagctcggccagcgaaaagcacatgcacaggtacatggtcgccatcagcagcgtggcgatgaacagcccgccccagccgccctgggccaggccgaagttccagccggcgtagtcaccggaaatcacgtaggccacgcccaggcccaccagcagcacccaaccggcggcgcctttcttcagttcgcgttcctggaaataggtactgccaactgcttcgaaatcgatggcgtgtgtcgggggtgtcgcactgctgtgttcgagagccatggggatcatccttcaatgggttcgggtacggcaggatcgttaaagcaagcgctgtgccttcgggctgttcggcgctatttgtgcatattcgaaagggaaacaccgccaagggcgcaccagcccgacaccttgcggcgcgggcgggcactttttcagagcgctagaagaaccccagtggattgatgtcgtagctcaccagcagattcttggtctgctggtaatggtcgaggatcatcttgtgggtctcgcgaccgacgccggacttcttgtagccaccgaatgccgcatgcgccgggtagaggtggtagcagttggtccacacgcgtccagccttgatcgcccggcccatccggtaggcccgattgatgtcacgggtccagacgcccgcgcccaggccgtactcggtgtcgttggcgatcgccagcgcttcggcttcgtccttgaaggtggtcacgccgatcaccgggccgaagatttcttcctggaacacacgcatcttgttggtgcccttgagcagcgtcggctggatgtaataaccggtcgccaggctgccttcgagtttctcgacgccgccaccggtgagcacttcggcgccttcctgtttggcgatgtccagataggacatgatcttgtcgaactgctgctggctggcctgggcgccgaccatggtgtcggtgtccagcgggtcgccgcgcttgatctgcgagaccttcttcatcaccgcttccatgaagggcccgtagatggattcctgcaccagcgcgcgcgacgggcaggtgcagacttcgccctggttgaagaagcccagcaccaggccctcggccgccttctcgatgaaggtgggctcggcctgcatgatgtcttcgaagtagatgttcgggctcttgccgcccagctcgacggtgctcgggatgatgctctcggcggcgcgcttcatgatgtgcgagcccaccggggtggagccggtgaaagcgatcttggcgatgcgtttgctgctcgccagggcttcgccggcttcacggccgtagccctggacgatgtttagcacgcccggcggcaacagatcgccgatcacttccatcagcacggcgatgcccagcggcgtctgctcggcgggcttcaagactacgcagttgccggcggccagcgccggggcgagcttccaggcggccatcagaatcgggaagttccaggggatgatctgcccgaccacacccagcggctcgtggaagtgataggccgcggtgtgctcgtcgatctccgcgctggtgccttcctgggcgcggatgcagccggcgaaatagcggaagtgatcggccgccagcgggatgtcggcgttcaacgtctcgcgcacggccttgccgttgtcccaggtttcggtgatggcgagcatttcgaggttctgctcgatgcgatcggcgatcttcagcaggatcagcgagcgcgcctgcacactggtcttgccccaggcatcggcggcggcgtgggcggcgtccagggctttctcgatatcggcggcgtccgagcggggaaactcggcgatgggctggccgttgactggagagaggttggtgaaatattggccgttgaacggctcgacgaactcgccgttgatgaagttgccgtaacgggacttaaaggaaacgacagcgccttcgctgccgggatgggcgtaacgcatggtgagtctccggaacttgtaattgtgttgggactgctgtgattcagcgtagaacaaagcccgttcgtcggttggcgaggcgacgtgcggtgcggcggctagggggcgggtgctgtgctaatctgcgccgcagttttcggcgccgacaggcgcggccgggccgccacgcttgctcgcgcgccacggcgtatttcagaggtcatcaatgcatatccacattctcggcatctgcggcaccttcatgggctcgctcgcggtgctggccaaggaactgggccaccgcgtcaccggctcggacgccaacgtctatccaccgatgagcacccagctggaagcccagggtattgagttgacccagggctacgagcccagtcagctcgaaccggcgccggatctggtagtgatcggcaatgcgctctctcgcggcaacccggcggtggaatacgtgctgaacaagggcctgccttatgtttccggtccgcaatggctggccgatcacgtgctccagggccgctgggtactggccgctgccggcacccatggcaagaccaccaccagcagcatgctggcctgggtgcttgagcatgccggcatgagcccgggctttctcattggcggcgtgccgcagaacttcggtatctcggcgcgcctgggcggcacaccgtttttcgtggtcgaggcggatgagtacgacagcgccttcttcgacaaacgcagcaagttcgtccattaccgcccgcgcaccgcgatcctgaataatctcgagttcgaccatgcggacatcttcccggatctcgcggcgatcgaacggcagttccatcatctggtgcgcaccgtgccgagtgaagggctggtcattcatccgcaggctgaagaggcactcaagcgcgtcatcggcatgggctgctggacgccggtgcagaccaccggagaagacggtcagtggcaggcgaacctgctgcgcgccgacggctcacggttcgaggtgattttcgagggtgccgtgcagggcgtggtggactgggagctgactggccagcacaacgtcaacaacgcactggcgaccctcgccgcggcgcgtcacgtcggcgtgctgccaaagcagggggccgaggcgctgagcgagttccgcagcgtaaaacggcggatggagaaggtcgccgaggtcaacggcgtgaccatttacgatgatttcgcccatcacccgaccgccatcgccacgaccctcgacggtttgcgcaagcgggtgggcgatacgtcgatcattgcggtgatcgagccgcgttccaactccatgaagctcggtgcccatcgcgagggattggctgaatcggttgcgctggccgatcaggcgatctggtacgcgccgccgaatctcggctgggatctggccgccacggtcgccggctcgccggtcgagacgaccgtgtgcgattcgctggaagccatcatcgccaaggtcaaggccgacgccacgccgggcacgcaggtggtggtgatgagcaacggcggctttggtgggttgcacgtcaaattggccgccgctttgagctgatcgcccaaggtggaaacgcttcgcggtttccaccctacgagtttgcgaatagggcgaatttgttctcaaagtgtcgcgagcgaagcttaggcaaggcgaaaccttgcgagaaagcggagcttgctggtgcgagtgagcatttcgagtaaggtttcaacgcagcataagcaagcgcagcagctttgggagcaaattcatgagcggaccggaacgcatcaccttggccatgaccggcgcctctggcgctcagtacggtctgcgtctgctggattgcctgattcaggaagaccgtgaggtgcacttcctgatttccaaggccgcgcaactggtgatggccaccgagaccgacgtcgtgctgccggccaagccgcaggccatgcaggcattcctttccgaatacacgggcgcggcggctgggcagatccgtgtgttcgccaaggaagactggatggcgccgccggcttccggctccggcgcgccgacggcgatggtggtggtgccgtgctcgaccgggaccctgtcggccatcgcgaccggtgcctgcaacaacctgatcgagcgcgcggcggacgttgcgttgaaagagcgtcgccagctgatcctggtcccgcgtgaagcgccctattcgagcatccacctggagaacatgctcaagctgtcaaatcttggcgtgaccatcctgccggcatcacccggcttctatcaccaaccgcagaccctcgacgatctgatcgatttcgtcgtcgcgcgcatcctcaacctgctcaacatcccgcaagacatgctgccgcgttggggcgagcaccatatcgtcagcgacgattgagccggcctttgaacggataggttgagcgcagcgataccatcaggatcacctcacaagcggagcgtccatgaagcagccagccatgcaactctgctcgacattcctggccttcctgctgctgtccggctgcgccacggtacgcaccatggatgccgccaaacccggtgcgccgatcgtctattcaggtacccgtctggactggtacagcctcaacggtggctgttgtcctctcgatcggtttggtgccgaggcgccgaaatacgcggtgctcgatctgcccgccagcgccttgttggatacgctgctgctcccctttgccctggcggcggagctgggcgtcgggctcggtgtccgcggcgggctctgatcgcgctccgctgcgtgcggcataactgatctggatccaggcggagcggttttacggctgacataattttgctcaccgatagcgctgcgcatggtcgccgacacgaggagagccgatgtgaaagaccgggcccagttccacatcaattactggatgatcgccatcctggtttttctcggcttgcagtatttgctgtcgatgcagcaggaagtggcgaccatcccctacagcgagttcgagcagcacctcaaggacggtcgtgtcgaagagctggcgattaccgagcggcggatcgagggcacgctcaaggagcccttggccggcggccagcggcgcttcatcgccaaccgcgtcgaaccgcagctggccgagcacctgcagcagtatccggtgcgctacaccggcaaggtcgagagcacgctggtgcgcgacctgctgtcgtggatcattccggcggcgctgttcttcggcatctggctgttcctgctcaagcgcatcggtggcggcctgggtggcggcggcatgatgcagatcggtaagagcaaggcgcgggtctacgtcgagaccgacatgaaggtgaccttcgccgacgtggctggcgtcgacgaggccaaggacgagctcaaggaaatcgtcgaatttctgcgtgacccaaagagctacggccgcctcggcgggcgcatgcccaagggcgtcctgttggtcggcccgcccggcacaggcaagacgctcctggcgcgcgccgtggcgggcgaggcgaaggtgccgttcttctccatttccggctccgagttcgtggaaatgttcgtcggtgtcggcgcggcgcgggtacgcgacctgttcgaacaggcgcgcgcccaggcaccggcgatcatcttcatcgatgaactggacgccctgggccgtgctcgcggtgccgggccgctatccggcggccatgatgaaaaggagcagacgctcaaccagctgctggtggagatggacggtttcgatacctccagcggtctggtgctgctggccgccaccaaccgtcccgaaatcctcgacccggcgctgctgcgcgccggccgattcgaccgccaggtgctggtggaccggccggacaagatcgggcgagtacatatcctcgatgtgcatctgaagaaggcccggctgggcaccgatgtcgacccgcaggccattgccgcgctgacgccgggtttcaccggcgccgacctggccaacctggtcaacgaggcgacgctgctggcaacccggcgcaacgcagaggctgtggcgatggaggatttcaccaccgccatcgaacgcatcattgccggccttgagaagcgcaatcgcctgctcaacccgcgtgagcgcgagatcgtcgcctatcacgagatgggtcacgcactggtcgccatggcgctgccgggcgtagacccggtgcacaaggtctcgatcattccgcgcggcatgggtgcgctgggttacaccatccagcggcctatcgaggaccgattcctgatgacccgcgacgagctggaaaacaagatggccgtgctgctcggcggacgtgccgcggagtggctggtgtttggccatctgtccaccggcgcggcagacgacttggccaaggtgaccgatatagctcgggcgatggtgacccgctatggcatgtcgcggcgcctcggccatatggcattggagcgcgagcctaacgcctttctgggcaacgaggcgatgctcggtctcaaacctcagcatgactatgcggaaagtactgccgcggcgatcgacgaggaggtgcaggagctggtgcagtcctccttccagcgcagtctggaactgctcgaagcgcgccgggcgctgttggagcgtagtgctcagcggctgctgcaacaggagaccctggatggggaggcgctacgcgagttgagcgccgccgtgggcgaccttccggtacagccagcgccctagaggcgcacagcaaaaaacggccctggatcgcgatgcgtgttgcgctgacgctatgtcgcatattcgcgcgcacgctgcagccgacctgagccggcgccttaccgcagcgtctcgcgccatcattccgatccaaacgactccctgttcagacgggccgcttcgcttccgataaggaaaggttatcgctcgatcagcggctgtcattaggcagcgcgcctggtggttcttagagtgttgccatgcaaggccgcatggccaccaacaagaagaacaagaaagcgagggaagacgatgaggcctggcctgatcgcgagcgggcgtcgcattcaatcgcctgctctttgccattcatatgatctgagtcgtggtgtgcctgccgagcctggagcggcgcgcctcggccgctcgcgcctttcccagccttgcctgcgccatctctctagcctgattcatccgcttcggcagcctgtggagcagcgaaatcgcgtgggtcggccggtggccactacatcgttcgggcgaattggaaaacaaagtggccggccaaatttgacagccaatcatatgatgatagggttcagtagacccaagggcagccgcacagaggcttgcatgtcgaacaactatcacagcgcaacggtggaatggctgggttcctggatcgcctcgggcaaggtccagccgggcgaggcgctgaaggtcgaggccggcctttgcgaagagctgggcgtgagtcgcaccgtgatccgcgaggcgatcaagacgctggtggccaagggcatgctcgacgtcggcccgaaggtgggcacgcgggtgacgccggtgcgctcctggaacctgttcgacgttcaggtcgtcggctggctggccgagaacggcctgccggaaagcttcgtgatggacctgatcgacttgcgccggacgatagagccgaccgccgtgcgctgggcctgcgagcgcgcaacaccgaaacagatcgccgaaatccaggcgacctaccaggcgcttgccgcgtccctgggcgacaaggacgagtacaaccgcgccgacaaactcttccatgaggcagtgctggcggccagccacaaccagttcatcgagcgcatggtgccggcgctgggcgccttgctggcggtgtccttcgaagtgtcctccacggtccccgacgagctcgggctgactctgccgttgcacaaggaaattgccgacgccatctccagtcgcgatggcgcacgcggggtctgggcgtgcatgacgctgatcgagcgcgcggccctgaccatttcacgtcattacccggagctggtcgtgtcacgcggcgagcagactgcaccctaaaaaaacaatgaaagcggagtgcgaccatgcaatggctgcccatctcgcaacaacgctacaagctggccgagggcccgttctgggatgcccgggaccaggcgctttactgggccgacatcgtcggtcgactggcctgtcggctgggcccggacggctaccggcaatggcaattggccgagccggtgtcggccttcatcccctgcgccaacggcgatgcgctggtgaccctggccagcggcgtgtaccgcctcgatcctggcgctgccgaagccgagccccgactgttccgtgtcgctgacgccacgcccggcaaccgcgccaacgaagcgcgctgcgacgctcaagggcggctctggctcggcaccatgcagaacaacatcgccgaagacggtagcgatattccgattacacggcgctccggcgggctgtttcgagtcgacccggacggctcggtcacgcagctgctcagcgacctgggcatcgtcaatacgctgctgtggaacgaggcgggcgatcgcgtcatctgcggcgacaccctggacgagtcgttatacagccaccgcatcgccgccgacggacgtctggtcgaccggaaggcctgggccggtccgcatccgcgtggcgtacccgacggttcggccatggattcggcaggctacgtctggaatgcacgctggggcgggcattgcctgctgcgctacgcaccggacggttgcctcgatcgcatcgtcgagctgcccgtcagccatcccaccagttgcgtgttcggcggccccgacctgacccatctttacgttacctcggccatgcccgatggcgcggcgaacgacctggacggcgccgtgctaatggccgacgtcggcatcgtcggactagccagtacaggcttcgccggttgacctgtttacccggccgcgctgcggccacttaactgctcaggagttgttcacatggcctcaccgctttcattgcccccaacaccagaaccccagcgcggcgagcgcctgaaaggcaaagtcgtggtcgtcaccggcggcgcccagggcattggcgaggccatcgtggcctgcttccaggcgcagcaggccaaggtggtcatcggagacattcagggcgacaaggccgagcgggtcgccgccggctggcgcgagcggggcggtgaggtgcgcgcgctgagaaccgacgtcaccaagcctgccgagctggaggcgctggtcggtctggcgctggagcactacggccaggtcgatgtgctggtcaactgcgcaggggtcaacgtgttccgtgacccgctggagatgaccgaggaagactggcgacgctgcttcgccatcgacctggacggcgtctggttcggttgcaaggcggccctgccgcacatggtgcagcgcggtgtcggcaacattatcaacatcgcctcggtgcactcgaccaacatcattcccggttgcttcccataccccgtcgccaagcacggcctgctcgggctgacccgcgcgttgggcatcgaatatgcgcccaaggggattcgcgtcaacgccatcgcgccgggctacatcgagacgcagctcaacgtggactactggaacgatttcgccgacccgcacgccgagcgccagcgcgccttcgacatgcatccgccgcggcgcatcggccagccgatcgaggtggcgatgaccgctttgttcctcgccaccgacgaggcgccgttcatcaacgctgcctgcatcaccatcgatggcgggcgctcggtgctttaccacgattgagcagtacatgggttcgtttcaaggggccgacagtggccccagcggcaagccgccagcaacgcattcggtggtgacgtatcagggctgaacgcctgacgagtcaataaaagctattcaataagaataatggaggtagctatgttccggtctttcggaatccgttcgctttgctgtgcagcgttaactgtgggtgcaatgagtttcgccggtgcgaccctggccgacgacgaggtcaagatcggctttctggtcaagcaacctgaagagccctggttccagaccgaatgggccttcgccgagaaggccgccaaggacaagggcttcaccctgctgaagatcgccgtgccggacggtgagaagaccctcgcggccatcgacagcctcgcggccaacggcgccaagggcttcgtcatctgcgcacccgatgtggcgctcggcccggccatcgtcgccaagtccaagttcaacgatttgaaggtcatggctgtcgatgatcgcttcgtcgatgccaagggtcagcccatggaagacgtgccgtacctcggcatggctgccttcgaagtgggccagaagcagggcgcggccatggccgaagaagccaagaaacgcggctgggactggaacgacacctacgcggtgatcaacacctacaacgagctcgataccggcaagaaacgcaccgacggctcggtggacgcgctgaaaaaagccggctttcctgaagaccacatcctctataccccgcagaagaccctggatgtgcccggcagcatgaacgccaccacctcggcgctggtgaagctgccgcgcggcgcgaagaacctgatcatcggcggcatgaacgacaacaccgtgctgggcggcgtacgtgccaccgagagcgccgggttcagcgccgacaacgtgatcggcatcggcatcaatggcaccgatgccatcggcgaactgaagaaggaccacagcggcttctatggctcgatgctgcccagcccgcacatcgaaggctacgaaaccgcgcggatgatgtacgagtgggtcaccaccggcaaagaaccgccgaagtacacggcgatggacgaagtcaccctgatcacccgcgagaacttccaggaagaactggaaaagatcggcctctggaaataggccggtccattcgcgggaggcctgattccaggccgatttcagtatcgaactcgcccggtcgaacgggcgagggtggagacgctccatgcttcaacaagtcaatgcgggcgatagcctgcggttcaacggcatcggcaagaactttccgggcgtgcgtgcgctgtcggagattagcttcgaggcgcgtcctggcaccgtgcatgccctgatgggcgagaacggcgctggcaagtcgacgctgctgaaaattctcggcggcgcctatcagccgagcagcggcgatttgcagatcggtgggcgcaatctggcgtttcgctcagccggtgaaagcatcgccagcggcgtcgcggtgatccaccaggagctgcatctggtgccggagatgagcgtggccgaaaacctcatgctcgggcacatgccgtcgcgcttcgggctggtcaatcgccgggcgatgctgcgccaggcgcgggaactgctcaaagggctggcggatgagatcgaccccgccgcacggctgggcagcctgtcgctggggcagcgccaactggtggaaatcgccaaggcaatgtcgcgcaacgcccatgtgatcgccttcgatgaacccaccagcagcctgtcggcgcgggaaatcgagcgcctgatggccatcatcgccaagctccgcgacgaggggcgggtggtgctctatgtctcgcaccggatggaagagatcttccgcatctgcgatgcggttacggtgttcaaggacggccgtttcgtctgcaccttcgacgacatgagcgagctgacccatgacgcgctggtgacctgcatggtcggccgcgatatccaggacatctacaactaccgcccccgtgagcagcaaggcgaggcgctgcgcgtcgaagggctgctcggccacggtttgcaggagccggcgagtttctcggtcagccgtggcgaggtgctcggtttcttcggcctggtcggcgccgggcgtaccgagctgctgcgcctgctcgccggattggctccgcacaacgccggtacggtgcagctcgatggccagccgttgcaactgaagtcggcgcgcgacgccatcgcttcggggatcctgctctgtcccgaggaccgtaagaaagaaggcatcgtgccgctgggtagcgtggcggagaacatcaacatcggtgcgcgtggccgcaatgcccgcctcggttgtctggtgcagggccgctgggagcgcgagaacgccgaccggcagatccgtgcgctgaacatcaagacgccatcggcggaccagcagatcgtttacctctccggcggcaaccagcaaaaggtgatcctgggtcgctggctgtcgatgccgatgaaggtgctgctgctcgacgagcccacccgcggtatcgacatcggtgccaaggccgagatctaccaaatcatccatgacctcgcggcgagcggtatcgcggtgatcgtcgtctccagcgacctgatggaggtgatcggcatctccgaccgcatcctggtgatgagcgagggcgcgatcactggcgaagtcacccgcgaccaggccgaagaatcccgcctgctgcaactggcacttccgcgctcgcgcggctgaacaacaatgatgaggtgctctatgtctgctcaacaaaacactctggccgcgccgcggcagggtctcaacatgcgccgcttcctcgatgactgggtcatggtgctggctgcgctcggcatcttcgtgttgtcggcgatcttcatcgacaacttcctttcgccgttgaacatgcgcggcctcgggctggcgatctccaccgtgggcatcgccgcctgcaccatgctgttctgcctggcttccgggcacttcgacctgtcggtcggctcggtaattgcctgcgcgggtgtggtggcggcggtggtgatgcgcgataccgacagcgtgttccttggcgtctcggcggcgctggcgatggggttggtggtcggtctgatcaacggcatcgtgatcgccaagctgcgtatcaatgcgttgatcgcgacgctggcgaccatgcagatcgtgcgcgggctggcctacatcttctccaacggcaaggccgtcggggtgatgcaggaggacttcttcctgttcggcaacggcaccctgcttggcgtgccggtgccaatcctgatcacggtggtttgcttcgccttcttcggctggctgctgaactacaccacctatggccgcaacaccatggccattggcggcaaccaggaagcggcgctgctggccggggtccatgtcgaccgcaccaagatcatcatcttcgccgtgcacggcctgatcggtgcgctggccggcgtggtgctggcgtcacggatgacctcggggctgccgatgatcggccagggcttcgagctgaccgtcatctccgcctgcgtgctcgggggcgtctcgctcagcggtggcatcggcatgatccgccacgtgatcgctggcgtgctgatcctggcgatcatcgagaacgcgatgaacctgaagaatatcgacaccttctaccagtacgtcatccgcggcacgattctgctgctggcggtgatcatcgatcggctgaagcagcgctgatcccaatcgcgccggttgccggcgcgctggagaaaacccgtggatacacagctgatcgcgctggactggggcaccagttcactgcgcgcttatcgactcggtgcggccggcgaaacgctggaggtgcgcggcttgccgctgggcgtcatgcagctcgacggcagcgaggcggagttcgaacgcgcactcgaacaggcctgcggcgactggcaacgggccgcccccgaggtgccgatgatcgcctgtggcatggtcggcagcgcccagggttggcgtgaagcccgctatgtcgaagcgccgctcggggccggtgagctgacgttgttgcccatcgagcgatcgcacgggatgccgctgtggttggtgcccggcgtgattcagcgcggcagcgtgccgaacgtcatgcgtggcgaagaaacccaggtgttcggcctgctcgatggcgatggcgaccaggttgagccgttgctgatcggcctgccgggcagccacagcaaatgggtcacggtggagggcggacagctcagccgattccagaccttcatgaccggtgaggtctatcaggcgctgctcggtcatacgattctcggccgcacggcggtgaccagcgagagtttcaacgccgcagccttcgagcgcggcctgcgcgtggcgaggtcgagcgaggggcaagccggcccgctttcgacgatcttcagcagtcgcacgctggtgctgaccggcgagctcaacggcgcagcccaggccgactacctctccgggctgttgatcggccacgagctggctgccatgacctcggtgctgcaagtgccgccctctcaacccatcgtcctcatcggcaattcgacgctctgtgcccggtacctgtgggcgctcgagcattgcggattcgaatcgctgcgcttcgcgcccgaggccacggctgccgggctttggaaaattgccgcaggcgccggcctgatcgccaccgacacagcaggagagccgaatgttcaaccgtacgctcgccactaacggcttgatcgcgattcttcggggcctgcgccccgaggaagccgagtcgatcggcagcgcgctctatgccgccggtatcagaatcatcgaagtaccgctcaattccccgcagccgctgcgcagcctcgaaatcctgcgccgaatcttgcccgaggattgcctggtcggtgccggtaccgtgctgtccgccgagcaggtgcgggccgtgaaggtggctggcggacagttgatcgtcatgccgcactgcgacgttcaggtgctgcgcgccgcgaaggatgcgggtctctacctcgcgccgggtgtcgccacgccgagcgaggcctttgctgcgctggcggccggcgccgacgcgctcaagctgttccccgccgagcaggtcggtatcggcgcgatgaaagcctggctggccgtgctgccacccggcacggcgctgctgccggtaggcggcatcacgccggacaacatggcgccttatctgcgtgcgggggcggccggcttcggtctgggctctgcactttattcgccgggattgcccgctgatgaggtgggtcgccgggcacaggccttcattcaggcccgccgcgcggcgatggcctgaccactttctgcgagagaccgagcaatgaagattacccgccttaccacgctggtcgtgccgccgcgctggctgttcctcaagatcgaaacggatgaaggcatcaccggctggggcgagccggtggtcgaaggccgtgcgcacagcgtcgccgcggcagtggatgagttggccgactaccttgtggggcgcgacccgcgcaacgtcgaagatctctggacggtcatgtaccgcggcggcttctaccgcggcgggccgatcctcatgagcgccatcgccggcatcgatcaggcgctgtgggacatcaagggcaaggcattgggcgtctcggtcagcgacctgctcggtggccgggtgcgcgagcgtatccgggtgtattcctggatcggcggtgatcgtccggcggataccgccaacgccgcccgcgatgcggtggcgcgggggttcagcgcggtgaagatgaacgccagcgaggagctacagttcgtcgacagccacgccaaggtcgatgccgtgttggcgaacatggcggccgtacgcgacgcggtgggaaagaacgtcggcattggcgtggattttcacggccgcgtgcacaagcccatggcgaagatcctgatcaaggagctcgagccctatcggccgatgttcatcgaggagccggtgctcagcgacaactacgaggcgctcaaggaactggcaccgctgtcctgcgcgccgatcgccctgggagagcggttgtactcacgctgggatttcaaacgcatcctcgccgaaggctatgtcgacatcatccagcccgacacctcccacgccggtggtatcaccgagacgcgcaagattgccagcatggccgaggcctacgacgtcgcgctggcgctgcattgcccgctcggaccgattgccctggcggcgtgcctgcagttggatggcgtctgctacaacgccttcattcaggagcaaagcctgggcatccattacaaccagggcaacgacctgctcgactacatctccaatcgcgaggtgttcgagtatcaggatggcttcgtggcgataccgaacgggccgggactgggcatcgagatcaacgaggattacgtgctggagcaggcgcgtatcggccatcgctggcgcaaccccatctggcgccacgccgacggcagcgtcgccgagtggtgagccccagtttgcggtgagttgatggcacaccgagcaggtgttttaaaaaggccccgtgcggggccttttgcgcatcagggcttggggaatttgtagatcgtggtctgggtgtaggtctggcccggatcgaggcgagtgctcggaaaattcggctgattgggcgcgtccgggtagtgctgggtttcgagggtaaaggcgctccagtgcggataggccttgccgcctttgccgttgatgctgccgtcgaggaagttgccggtgtagagctggacgccgggttcggtggtgtacatcagcagccgccgtccggactcgggatcgagcacttcggcggccagcttgctcaggtctccgtcggtgtcgagcacccagttgaaatcgaagccgccggccttggcttcggcgaatttcagctgctgatgatcatctttgatatgcgcgccgaaaggggtcggctggaggaagtccatcggtgtgcctttgacctcggccagctcaccggtggggatcagcttttcggtcaccggtgtgtagcgcgaggcgtacagtgtcgcgacctgatcgagcacactcgggctgcccgccccggcgaggttgaagtagctgtggttggtcaggttgagcaccgtgggtttgtcagtggtggcccggtactcgatgcgcagctcattgtcgtcgttgaggctgtaggtcacgtgggtggtcatggtgccggggaaacccatttcgccatcgggcgacacgtagctcaactcgacgccgacgctgccgtcctcgtcggcaggcttggccttccagatccgcttgtcgaagccctccggtccgccgtgcagggcgttgctgccgtcgttctgcggaacctgataggtcttgccgtcgagttcgaagcggccattggcgaggcggttaccgaagcggccgatggtcgcgccgaaatacacgttgccgttcttgatgtagccatcgacgtcgtcgaagccaagcacgatgtcttcgaacttgccgttcttgtccggcacccgtaacgactgcagcacgccgccgtaggtgatcacgacggcttccagtccctggctgttcttcagggtgtatttctcgatgggcgtgccgtccggcatcttgccgaaactgccgtgctggttggacaggcctgcggcctgggcgccgagtgtgctgatcatgagagacagggcaattccgttgagtaacagtctgggttgcatggtttcacctggcattgttgttgttttttgcgtgagcgcacgccgccagggtggtatgggtgggcgacgttgcgccggctaaagcctagacagccgagccattccctcccaatacgaattacggcatttacgatacgcaaaccgatatgccttgcgcgtgttgatgcgagcggtgatcaggtgcgctggcgggttgtgtgctgcgccagtgcccactcgacgtgttcgcgtaccagctcggacggatcgtcgcggcgcgcctgcagcgcttcgagcacaggaatgctcgagggcgcgttgcccaggcctaccgccaggttgcgcaaccagttctgatagcccgtgcgccgcagcggcgagccttcggtacggctgagaaactcgtcttcggtccagcgaaacagcgtggccagctcggcattgtcgagactgtgacggggctggaagtcgctctgctcggtcggtttggcgaagcgattccaggggcagacgatctggcagtcgtcgcagccgaacacacgattgccgatcttcgaccgcagctcgacgggaatcgaacctttcagctcgatggtgaggtaggaaatgcagcgccgcgcatccagcatgcgttcgccgacgaaggcttcggtcgggcagatgtccaggcaggcgtggcaactgccgcagtggtcgcgcgcggtgggctcgtcgaccggcagggcgatgtcgacgaagagttcgccaaggaagaaccagctgccagccttgcgattgagcaccagggtgttcttgccgatccagccgaggccggcctgttgcgccacggctttttccagcaccggtgcgctgtcgacgaacgcacggaagccgaagggtccgatcacctgctgaatacgctcggccagttgctgcaggcgtttgcggatcagcttgtgatagtcacggcccaatgcgtagcgggacacataggctttttccggatgcgccagttgcgcggccatgcgcgtatcgcccggcaaataatccatgcgcagcgacacgacccgcagcgtgcccggcaccagctgctccgggtgggaacgtttgctgccatgggcagccatatagtccatctcgccgtggtagccggccgccagccagcgctcgaggtgcgcctcatgctcgcccaggtcgacgccggtgatgccgacctgctggaagccgagctcgcggccccactccttgatggaggcggcaagtgcggcggggtcgagggtggtgctggacatggcttcgggtcgtcgggtgttgcggcgtgtgatgggcgggctggtgttcggtgcggcgcgcggcgcctgttctgactgtcgcgctgcccgccttgaggcggcgatcttctattgatctgccagctacgtgctgcgggcggtcacgcagacgcatgcgtataattctgccagatattcgctcgggtgattcatgtcccagaccaccgatacactccccaaccgcctttactcggccgctcaggtgcgcgatctcgacgctcggctgatcgccgccgggacgcccggtttcgaactgatgcagcgcgccgcccatgccgcctggcgcgccctgcggcggcgctggccggacaccgatgaagtcaccgtgctcgccggtcgcggcaataacgccggcgatggttacctgatcgccgctttggcgcagcgtgctggtcgtcaggttcaggtcattgcagtcggtgatccaaagcagctgcagggtgatgccgcccaggcattcagtgaggcgcaggcagcgggcgtccggatgacgtcctggtcgtccgctgtcgagctgcgtggcgtgctggtcgatgcactgcttggcaccggtatctctggcgaggtgcgtgagccctacgtcagcgccattcgcgcgatgaacgaaagtgctctgccgatcctcgccgtcgatttgccgtcgggactctgtgccgataccgggtctctgttgggcgaggtggtgcaggccgaactgacggtgacattcatcgggctcaagctcggcctgctcacgggcgaggggccggctcggatcggaacgctggtattcgacgacctgcaagccgatgccgagttggtcgagcagagcgagtatgccgcgctgcgcatgtccgaaacgagtctgcccaagctcgcgccccgttccccgacggctcataaaggcagtttcggtcaggtcctggttatcggcggcgaccttggcaccggcggcgctgccttgctgacggccgaagcggcgctgcgctgcggggccggcatggtgaccctggcgacgcgcccggagcacgtcaccgcctcgttggtgcggcgcccggagatcatgtgcagcggagtcgaatccacctatgcgctgaccgggctgaccgggcgcgctgatgtgctggtgatcggcccaggtttgggtcaagcgccgtgggggcgcagtttgctgtcgctggcgccgcagtgtcgcgtccctcaagtgtgggacgccgatgcgctgaacctgctggcgacaggtgcggtcgagttgccggcgaactgcctgctgacgccgcaccctggcgaggccgcgcggctattgggtattacggtggccgaagtgcaggctgatcgtccggcagcggcccgtgcgctggcggcccgttttgactgtgccgtgctgctcaagggcgccggaaccctgatcgccgaccgtgatggccgcctggcgctgtgcgatcgcggccacccggcgatggccagcgcggggctgggcgatgtcctcgctggcgttgcgggtgcactactggcacagggactggaaccctatgaagcggcctgcctgtcggtctggctgcatgcttcggccggagagcggcttggcgcagcgggcagggggcttgccgcggctgatctgattccggtggttcgccaattgctcgaggagcattcgccatgcttgaactgacgctggtggcggccgacgaagacgccatgctttcgctgggggcgcgcatcgcccaggcgaccggtggtcggggcgtgatctacctgcatggcgatctcggcgccggcaaaaccacgctgtcacgcggactgatccgtggcctggggcatgcgggcaaggtcaagagcccgacattcacactggtcgaaccctacgaaacgcccacggcgcgtgtcttccatttcgatctgtaccgcttgctcgatccggaagagcttgagtttctcggcatccgcgactatttcgaaggtaacgccttgtgcctggtggagtggccggaacgtggcgccggcattttgccaaaggccgacctggacattaccattacgccccacggggccggccgtatgctgcgcctgacgccacatggcgtgcgcggtgaaggctggtgttccatcctgaccgtcggcaatcaatgaacatcatggggttgggtatgcgcatgcgcgcgctggtaagtggtttggcattgatgctagcggccgttcaggtcctggctgcctcagatgtgcagagcgtgcgattgtggcgggcacccgacaacacccgtctggtcttcgatctttccggcccggtagagcacaaggtgttcacgctttcggcgcctgatcgcatcgtgatcgacgtcgaaggcgctaacctgcccaagccgttcgatcagttgcccctcgataacacccccatttccggtttgcgtgcggcgaagttcgatgccgacacgctccgtgtggtcatcgatctctctgcggcagtcacgccgaagagctttacgctgccgccgaaccagcagtacggcgaccgcctggtcgtcgacctgttcgacgagggcgccgagccttccaccacggccagcgttccgacgaccaccacgccgagcaagcctgccgcgccggtgtcgccgaccctgccggcgctgaagctgccaccgctgccgtccagcaaacgcgacatcgtggtcgccatcgatgccggccatggcggcgaagacccgggggcgatcggtcccggcaagaccttcgagaaaaatgtggtgttgcagatcgccaaagagctgcagcgccagatcaacgccgaaaaaggctaccggggcgagctcgtgcgcaccggggactacttcattccgttacgcaaacgtaccgagatcgcccgtaagaagggcgccgacctgttcgtctcgatacatgcggacgccgcgccccgttcatccgcttatggcgcctccgtgttcgccttgtcggaccgtggcgccacgtccgaaaccgcgcgctggctggccgacagcgagaaccgctcggacctgatcggcggcgctggaaacgtcagcctgggtgacaaggaccagatgctcgcgggcgtcttgctggacctgtcgatgaccgcctccctttcgtccagcctcaatgtcgggcagaaggtgctgagcaacatgggccggatcacgccgctgcacaagtcccgggtcgagcaggccggattcatggtcctgaagtctccggacattccgtcgatcctggtcgagaccggtttcatctccaatccgtccgaggcccgcaagctgcaaacggcggcgcatcagcagtcattggcgcgttccatccacagcggtgtgaagcagttcttccaggaaaatccgccaccgggcacctatgtcgcctggctgcgggattccggcaagatcgccagcgcaccgcgcgaacatgtggtgcggtcgggtgaaagcctggccctgttggccgagcgctatcaggtcagtctgccggctttgcgtagcgccaacagcctgaagagcgacgtgatccaggttggccagaccctgaacattcctgccacgacactggcttctcagccatgaccgaagctgcacgcatccagctattgagcccacgactggcgaaccagatcgcggcgggtgaggtggtcgagcgacctgcttcggtgatcaaggagctgctggaaaacagcctcgattcgggcgcgacgcggatcgaggtggatgtcgagcagggcggcgtgaagctcttgcgcgtgcgtgacgacggttgcggcattccggccgatgatctcccgttggcattggcgcggcatgccaccagcaagattcgcgacctggaagacctggagcgggtgatgagcctcgggtttcggggcgaggcgctggcgtcgatcagttcggtatcgcgtctgacgcttacctcgcgcacggccgatgctgccgaggcctggcaggtcgaaaccgaaggccgggacatggacgctcgcgtccagccggcagcgcatcccgtcggcacctcggtcgaggtgcgcgatctgttcttcaatacgccggcgcggcgcaagttcctgcgtaccgagaagactgagttcgaccacctgcaggaagtcatcaagcgactggcgttggcacgcttcgacgtcgcctttcacctgcggcacaacggcaaggccatcctggcgctgcatccggccaacgacccggcgtcgcgtgggcgtcgtgtggcctcggtgtgtggtccggcgtttctcgagcaggcactgccggtcgagatcgagcgaaacggcctgcacctgtggggttgggtcggcttgcctaccttctctcgcagccaggcggacctgcagtatttctacgtgaacggacgcatggtgcgcgacaagctggtcgcgcacgccgtaaggcaggcctatcgcgacgtgctgttcaacggtcggcatccgaccttcgtgctgtttctggatgtcgatccggcggttgtcgacgtcaacgtccatccgaccaagcatgaggtgcgcttccgcgataaccgcatggtgcacgacttcctgtacggcactctgcaccgtgcactcggggatgtgcggccggacgaccagttggcggcacctgctagcacggggcccgctgcccaggttagcggtcgtgaagcgggagagttcgcggggcagaacgagatgagcctcgcagccagcgtactcgagccccaggcgccgcagcctgcctggctcggcgcgggcgctggctatcaggcgccccggccgcagccgacgggaaacgtcgcggaggcgcagggcgcctatcgggcgttcttttcaccgctggccgaggcgagtccggcggccttgccggagagccaggacgacgtaccaccgctcggctatgcgctggcgcagctcaagggcatctacatcctcgctgagaacgcgcaggggctggtgctggtggatatgcatgccgctcatgaacggatcatgtacgagcggctgaaaaccgcgatggccagcgaagggctgcgcggccagccgttgctggtgccggagtcgatcgccgtgagtcagcgcgaggcggattgcgctgaagagcatggccggtggttccagatgctcggtttcgagctgcagcgacttggccccgagagcctcgccatccgccagattccgtccttgctcaagcaggccgaggcctcgcaattggttcaggacgtgctcgccgacctgctcgaatacggcaccagtgatcgcatccaggcgcatctcaacgagctgctcggcaccatggcctgtcacggcgcggtacgcgcgaaccgccgtcttaccgtgccggaaatgaacgggctgctgcgcgacatggagcagaccgagcgcagtggtcaatgcaatcacggccgcccgacctggacgcagatgggcatggctgacctggacaagcttttcctccgcggtcgctagtcctctttatcgctctcgggtgcggccgccggacccgaggcctctgttttgagcccacatgtctcgattacctcccgccatcttcctcatgggcccgaccgcagccggtaaaaccgacctggccatcgagctcgcaaaggtgctgccgtgcgacttgatcagcgtcgactcggcgctggtctatcgagaaatggatatcggcaccgccaaacccagtgcagaggtgctgcaggcgtttccgcaccgtctgatcgatatccgtgacccggcgcagagttactcggcagcggagttcgcctccgatgcgcttgccgcaatggccgaaagcacgggtgccgggcgcataccgctgctggtcgggggcaccatgctctacttcaaggcactgagcgaaggccttgcgcagatgccggccgccgatcagcaggtccgcacggagctggaggctcaggccagaacggaagggctcgccgcgctccatcggcaattggccgaggtcgatccggagtccgccgcacgtatccaccccaacgatccgcagcgcctggtcagggcgctcgaggtctatcgtgtcagcggcatcagcatgagcgagcatcgtgcccgacaaaggcagcaaaaagccggagcgggcgcgccagacggcggcgtcttgccttatactgtcgcgcagttgtccgtcgcgcccgcgcagcggcaggtcttgcaccaacgtatcgaacagcgcttcgtggcgatggttgaacagggctttgtcgaagaggtcgaatatcttcgcgggcgcgctgatttgcatcccgaactgccttccatgcgtgctgtgggctatcgtcaggtctggagttacctggacggtgcctgctcgcgagaggagatggttcagcgcggcatcatcgctactcgacagctggccaagcgtcaattgacctggttgcggggatgggagggggttcactggctggatagctcggcctgcgacaatctgccgcgagcattgaaatacttggagaggctcaccatattgagctgacactgcaatttgaccggctattctcaaatcactgatcagccgagttcgatttctaaaaattaatgaaaagatcctttaaggagtgcggcacatgtcaaaagggcattcgctacaagacccttacctgaacaccctgcgtaaggaacgcgttccggtttccatctatctggtcaacggcatcaaacttcagggccagatcgagtctttcgaccaattcgtcatcctgttgaaaaataccgtcagccagatggtctacaaacacgccatctcgacggtcgttcctggccgtccggttcgcctgcctgccgctggcgatgcggagcagtccgagtcgggtaacgactaaaggggtctttcattgttcttcgaacgtcccggtggtggtgagcgggctatcctggttcatctggatggtcaggatccagcggcgcgtgaggaccctcaagagtttcgggagctggcgcgttcggctggcgcggaaaccgttggcttcgtcaatgtggccaggcatcagccctcagccaggttcctgattggcagcggcaaggtcgaagagctgcatgatctcgtcaaggatggcgaggtcgagctcgtcatcttcaatcacactctgacacccagccaggagcgcaacctcgagcgagcgctcgaatgtcgtgtgctcgatcgaaccggtctgatcctggacatcttcgctcagcgtgctcgcacccatgagggcaagctgcaggtcgaactggcccagctggagcacatgagcacgcgtctggtgcgcggctggactcacctcgagcgacagaaaggcggtatcggcctgcgtggcccgggtgaaacccagcttgaaaccgaccggcgcctgttgcgcgtacgtatccgtcagatcaagcagcggctggagaaggttcgcggacagcgcgagcaggcgcgtcgtggacgtcgccgtgccgatattccgctggtgtccctggtgggctacaccaacgccggcaagtcgaccctgttcaatgcactgaccgagtcagacgtctacgccgccaaccaattgttcgccacgctcgacccgaccttgcgccggctggagctcggtgatctggggccggtcgtgctcgccgatacggtgggtttcattcgccacctgccgcacaagctggtcgagtcctttcgcgccacgctggaagaatcgagcaacgccgatctgctgctgcatgtcatcgatgcgcacgagcccgagcgagatcagcagatcgagcaggtgctggccgtgctcaccgaaatcggcgcgcacgagctgccgatactggaggtctacaacaaggtagacctgctggaaggcatcgagccgcaaatccagcgcaatgccgatggagtgccgcagcgcgtctggatatcggcgcagcagggtctgggcctcgatctgttgaagcaggccatcgccgaattgctgggcaatgatctgttcgtggggacgctgcggcttcctcaatccctggggcgcctgcgtgcgcaactgttcgagctgggtgccgtgcagtcggaagcgcatgacgaagagggcggcagcctgctcggcgttcgattgcagcgtgtggagctgcatcgcctgatcagtcgcgccggattcgaggcggagcaattcttcgaacaacacactttgcaataaagctcgggggcttttaggccgttcgttccgggcttttcggtagcattggcgggcgcgccgcgggcgcgcctttagctttatctgaatggagagcgctatggcttggaatgagccgggtggcaactcgaacaaccaggatccctggggtagcggcggcggtggccgtcgtggcggcggcgatcagaagggtccgccggacctggatgaggctttccgcaaattgcaggacagcctcaatggcatgttcggtggcaagaagcgtagtggcggttcgtcgggcggcggagccggtcgtcgtggtgggttcgggctggtctggatcggcctggtgctgttgctggctgtctggctgttcaacgcgatctacatcgtcgacgagcaggagcaggcggtgatactgcgcttcggcaagtaccacgaaaccgtggggccgggcttgaacatctatttcccgccattcgatcgcaagttccaggctaacgtcacccgtgagcgctcgtacagcaagcaggggcagatgctgaccgaggacgagaacatcatcgaagtgccgctgacggttcagtacaagatcaatgacttgcaggccttcgtgctcaatgtcgaggatcccgaggcgtccctgcagcacgccaccgacagtgccgtgcgtcacgttgtgggctccaccgcgatggaccaggtgctgaccgagggccgcgaggcgatggcgggcgaagtgaaggagcgcttgcagcgtttcctcgacaactacggcaccggaatagtcgtcactcaggtcaacctgcaaagcgccgcagcgccgcgcgaggtgcaggaagccttcgacgacgtgattcgtgcgcgtgaagacgagcagcgcgagaagaatcaggccgagtcctacgccaacggcgtcattcctgaagcccgcggccaggcccagcgcatgctggaagaggcgagcggctatcgtgatgcggtgatctcgcgtgcccagggtgaagcggatcgcttcaccaagttggtcgccgaataccgcaaggcaccggaggtgacgcgcgagcgcctgtatctcgagaccatgcaagaagtcatgggtaacaccagcaaggtgctcgtgaccggcgacaaggggcagaacaacctgctctatctgccgctggacaagatgatcaacagccgtggtgctacctccgagcggtcgcccgcggcatccgcctcgggtgcatcgacacaggctacgcgactgcctccggagctcgatccgcgtgaagtgcgtacaagggaggtccgctaatgagcaataaatccctgaccgccctgattgtcggcgtggtgctggcgatcgtgttgtggaacagcttctacatcgtttcgcagaccgagcgcgcggtgctgttgcgcttcggtcgcatcgtcgagccggacgtcaagccggggcttcacctgaagattccctacgtcaacagcgtgcgcaaattcgatgcgcgtctcatgacgctcgacaccagtacggcccgcttcctgacgctggaaaagaaggcgctgatggtcgactcctacgccaagtggcgagtggatgatgccgagcgcttctataccgcgacctccggcttaaagcagattgccgatgagcgtcttgcgcgccgccttgaagctgcgctgcgagatcagttcggtaagcgcaccctgcacgagtcggtgtccgggcagcgcgacgagctgatggcgttggtgaccaatagcttgaatcgggcggcacaacaggaactcggtatcgaggtggtcgatgtccgcgtcaagggaatcgacctgccgcgtgaggtgaatcgcagcgtgttcgagcggatgagttccgagcgcgagcgcgaagcgcgtgagcatcgggcaaaaggtaaagagctggccgaaggcattcgcgccgatgccgatcgtcagcgtcgcgtactgctggccgaggcgttccgtgaggccgaggaactgcgtggtgatggcgatgcgcaagctgctgccatctacgccgcggcctatggccaggatcgggaattctattccttccatcgcagcctgcaggcttatcgcgaaagctttgccaacaaggacgatgtgctggtgctggaccccaaaagcgactttttccgctatctggagtctgccacggcgcagtgatcgggcgatcacccggtgggcgataccgtccaccgggtgacccgttggcgaaacattgctatgatccgcgagccgggaaaagcccggcttttttgcgtctgcgccccagtggaagtaggcgggtccgggcatggtcagccatgctgatcgcccatgcgggcatggcgctgtcgccgtgatccgaacacatcgcacgcgaccgatgggcggctcacgctcacccggtgttcgtctgcttgaataggcttgccgtatcgagaggtgattggcgaaatggcaacggtagaccgctggctcctgccagatggcatcgaagaggtgctgccgcccgaggcggcgcgtatcgagaccgcacgacgtcgtgtgctggacctgttccagtgctggggctatgagctggtcatcacgccccatgtcgaatttctggagtcactgctcaccggggcggggcaggatctcgatctcaagaccttcaaggtcatcgatccactgtctggtcggcagatggggttgcgtgccgacatcacgccgcaagtggcgcgtgtcgacgcccacactttgcgtcgcgaaggcccgagccggctgtgctatgccggcagtgtgctgcatgccaagccgcaagcgctcgcgacatcgcgcagtccgatccagttgggtgcggaactctatggtgacagcagcacctccagcgacttggaggtgatcagcctgatgctcgaaaccctggggttggccgatgtgcccgccgtgcacatggatttggggcacgtaggaatctatcgtggcttggcgcgcgcggcggggctttccggggatgccgaacagcgcctgttcgacgcgctgcagcgcaaggcgatggacgagatatcggcgctgacggcggatgtcgaaccggcgctggcgagcatgttgcgtgcgctggccaggctctgcggcggtcgtgagaccctcgacgctgcgcgctcgtcgctcgctggagcgcctgctgcggtgctcgaatcgctcgatgatctggtccgtattgccgatcagctggcggtgcggtatccggacctgccgttgtatttcgatctgggcgagctgcgcggttatcactatcacaccggggtggtgttcgcggtgttcgtgccgggtgtcggtcaatcgattgcccagggtgggcggtatgacgatattggcgctgactttggacgagcgcgcccggcgacgggcttttcgacggatctgaaaaccttggtcagccttggcaatgccgagctcgccgccccgcgggtggggatctgggcgccgcactctaccgatcctgctctctggcaagccatctgcaggctgcgtgcgcagggtgatcgtgtggtccaggcgctcgacggacagcgggacgatgccgcgctgagcgctggctgcgatcggcaactgctgatgcaggatggttcctgggtcgtaacgtcgctgcctcgttaataccggccgtgttgagcgtgccagacttttttccaggttttttccgccggtcgtaaccggcatgcttcgccaagaggacaaggtttatgggtaagaatgtcgtggtcctgggcacccaatggggtgatgagggcaagggcaagatcgtcgatctgctgactgaccaggcggcggccgtggtgcgtttccagggcggccacaacgctggtcacaccctggtcatcgatggcgaaaagaccgtactgcacctgattccgtccggcatcctgcgtgaaaatgtagagtgcctgatcggcaacggggtcgtcgtcgctccggatgcgctgatgcgtgagatcaccaagctcgaggaaaagggcgttccggtgcgggaacgtctgcgcatcagccctgcctgtacgttgatcctgccgtaccacgtggcgctggatcaggcgcgcgaagcatcccgctccgagggcaagatcggcaccacgggtcgtggtatcggtccggcctatgaggacaaggtcgcgcgtcgtggcctgcgcatcggtgatctgttcaaccccgagcgcttcaccgtcaagctgcgcgagctgctcgaataccataacttcatcctgcagaatttctacaaggtcgagcccgtcgatttccagaagacgctcgacgaggccctgggctacgccgaaatcctcaagccgatgatgatcgacgtctcggcgcgcttgcatgagttgcgcaagcagggcgcacgtatcatgttcgaaggcgcgcagggctcgttgctcgacatcgatcatggcacctacccgtacgtgaccagctccagcaccaccgccggcggtacctcgactggctccggtttcggtcccctgtatctggattacgtgctgggcatcaccaaggcctacacgacgcgcgtcggttccggtccgttcccgaccgagctgttcgatgacgtcggtgctcgtcttgccgagcgtgggcatgagtttggctcgacgaccggtcgtgcacgtcgctgtggctggttcgatgcggtcatcctgcgtcgcgccatcgagatcaacagcgtctccggcatctgcctgacgaagctcgatgtgctcgatgggctggaaaccatccgtatctgcgtgggctacaaggaccgtaacggcgacgttctggtcgacgcgccgaccgatgcggacagctaccaggggctgcagcctgtctacgaagagctgcccggctggtcagagtccaccgtcggcctgaaggcccttgaagaattgccggccaatgcgcgcgcatatatcaagcggctggaggagctggtcgaggcgccgatcgatatcatttcgaccgggccggaccgcaacgaaacgatcgtgctgcgccacccgtacgcctgataagggtcaagtgaaaggccgccttcgcaggccatgtgaaaactgctgcgctcggtcatgctgcgttaaaaacagcctcaaaatgttcatttacagcacgtaaactgcgctttttcggctgtttttgctttgcttgaccttcgctcgttacgttttcacgcggcctgttcgggcggccttttcgtttccgctcggtctgggctgtaagcagtggcagtggcaattgctaagacagaaacgaaaaaaccgagccattggctcggttttttctgaagagtggtgcccaggagaagactcgaacttccacgatgttgccatcgctaggacctgaacctagtgcgtctaccaattccgccacctgggcacattgcgatgattgctcatcgactttttttgtcgattgctggtcgaggccgacaaacctcgtatttatgagactcttggcgaagccaggaatttcatcggtgtaaatggtgcccaggagaagactcgaacttccacggtgttgccaccgctaggacctgaacctagtgcgtctaccaattccgccacctgggcactgcaaacgatgatacttcaccgtttccgtgttacaacgtctaccagacattgtgggcgcgaactatacgggcgaggttatgccttgtaaagccccgtctgggaaaaataattcgctcgaaagctgccgtcggcacgcgtttcgcgcttcaatagagacagggcgttctgcccctatacatgaatgaaaggtgacatctcttaatggccgattggcaatccctcgaccccgaggccgcacgtgaagcggaaaagtacgaaaatcccatccctagccgcgagctgattctgcagcatctgagtgaacgcggctccccagcggcccgtgagcagctggtggaagagttcggattatcctccgaagatgatattgaggctctgcgccgccggttgcgcgcgatggagcgtgacggtcagctgatctatacccggcgcggcacctatgccccggtggacaagctggacctggtttgcggtcgcatcagcggccatcgtgacggtttcggttttctgattcctgacgacggcagcgacgacctgttcctcagcccggcgcagatgcgcctggtgttcgatggcgaccgttgcctggcgcgggtcgccgggctcgatcgccgtggccgccgtgagggcgctattgtcgaagtgatcagccgtgcccacgaaacgatcgtcggccgttaccaggaagaaagcggtatcggtttcgtcatggccgacaaccccaagatccagcaggaagtcctggtaacgccgggccgctccatggacgccaagccgggtcagttcgtcgagatcaagatcactcattggccgacccagcgcttccagccgcagggcgacgtcgtcgaggtgatcggtaattacatggccccgggcatggaaatcgacgtcgccctgcgcagtttcgacatcccgcatgtctggccggacgcggtgaaacgcgaagcggccaagctcaagccggaagtcgaagaaaaggacaagcaaaagcgtgtcgacctgcgccacctcccgttcgtcaccatcgacggcgaggatgcgcgtgatttcgatgacgccgtgtactgcgagaaactcagcggctggaaactgttttccggaggcttccgcctgtacgttgcgatcgccgacgtgtcgcactatgtgaaggtgggctccccgctggatcaggaagccgaggtgcgtggcacctccgtgtacttccctgagcgggtggtgccgatgctgcccgaagagctgtccaacgggctctgctcgctgaacccgcatgtcgatcgtctggcgatggtctgtgaaatcaccctgagcaagtcggggaagatgaccgactaccagttctacgaagcggtaattcactcccatgcgcgactgacctacaacaaggtcagcagcatgctggaacagccgtcgtcggcagagggcaagcgcctgatcggcgagtacggtgaggtattgccgcacctcaaacagctgtatgcgctgtacaaggtcttgctcaaagcgcgtcacacccgcggcgcgatcgatttcgaaacccaggaaacccggatcgttttcggggcggagcgcaaaatcgcggcgataaagcccaccgagcgcaacgatgcccacaagctgatcgaggaatgcatgctgtgcgccaacgtggccacggcgcgcttcctgcaagatcacgacatcccgggcttgtatcgcgtccatgacggccccccgttggagcggcaagagaagctgcgggccttcctcggcgagttggggctgaccttgcacaagggcaaggaggggcccacccccaaggactatcaggcgctgcttgagcgtatccaggaacgtcccgatttccatgtgattcagaccgtgatgctgcgctcgctcagccaggcggtctacagcccggacaaccacggtcatttcggcctgaactacgaagcgtacgcacacttcacctcgccgatccgtcgctatccggacctgctgatccatcgggcgattcgtagtgtgatccgttccaggcgcgatacgccgcatgttcgccgtgcaggcgctaccagcatgcccaaggcgcgcatctatccttatgacgaagccgcattggagcaactcggcgagcagtgctcgatgaccgagcgccgtgccgacgaagccacccgtgacgtggtcaattggctcaaatgcgagttcatgaaagatcgcgtaggcgagagcttcccgggcgtcatcaccgcggtaaccgggttcggtctgttcgtcgagctgaccgatatctacgttgaagggctggtgcatgtcaccgcgatgccaggtgactactatcatttcgatccgctccaccatcgcctctcgggagagcgcagcgggcgcagtttccggctcggcgatagcgtcgaggtgcgggtgatgcgggtcgatctcgatgagcgcaagatcgatttcgagttgatcagcggcggtagcaagggcactggcgctggacgtgactcggccggtgatcgggcgccgcgcaaggatggacggagcaagaagagtgcagatggctcctctgcgaaatccgaagagcctgtcagcgccgaagtccgcaagagtcgcgaggtcaagaaggccttgcttgccgatgccaaggggagcgctgcgaagagcaagccaaagcgcggttcggcaaagcccaaggcgtcgggcaagacgtctgccaagcccgatggcagcgcaccgcgcaagcgtaaggccaagtcatgagcgatctggagaagatctacggcgtgcacgccgtggaggccttgctgcgccatcatcctaagcgggtcaagcaggtctggttggccgaagggcgcgacgaccctcgcgcgcaatcgctgatccagttggccgctcaggcaaaagtgcgcgttggccagtgcgagcgccgcgagatggatgcctgggtcgaaggcgtgcatcagggcgtggtcgccgaggtgagccccagtcaggtttggggcgatgcgatgctcgaggagctgctggaccggaccgagggcgcgccgctactgctcgtgctcgacggcgtcacggatccgcacaatctcggtgcctgcctgcgcaccgccgatgcggccggcgcgctggcggtcatcatccccaaggataagtccgcgaccctgaatgccacggtgcgcaaggtggcctgcggtgcagccgaggttatcccgctggtagccgttaccaaccttgcgcgaacgctggaaaagctccagcaacgcggtttgtggatcgtcggtacggcgggtgaggccgagcaggagatttacgagcaggacctcagcggccctatcgtcttggtgatgggcgcggagggcaagggcatgcgacgcctgactcgcgagcattgcgattttctggtccggctgcccatggccggcagcgtcagtagtctcaatgtgtcggtggccaccggcgtttgccttttcgaggcgctgcgccagcgtcgctcggcgagccgccaataaggtggtggcttggcggagcatcgatcccgtcctgatgccgttcgtttcgaaacggatagccgccgccggggtcaattgtccgttccggggctgactggcggcctctcgggttaaatgtttggctggtcccggtttgcaccgggcgctggcagttgatcgcgaccgtctcccggctcgcatcatggaggttgtatgctgcaacgcccaccgttcgagacactgttcaggtcgtctccgaacgcctatctcctgttggatcgagatctcgtcattctggatgccaacgaggcgtacttgcggctgacgtcgcgtgcgctcgaggatatcgttggccagcgcatccatgaggcattcgcggccgatccgcaggcgacggaaacaagccacgtcgacgagctgctggagtcgttcgcgcgcgtgctgcgcagcaaggctgccgatacgttgcccatcattcgttattcgatcgccgtgagtcccgcaggcgacgcgccacaccaggatcgctactggagcgctacgcatacgcccgtgcttgacgaacggggcgaagtgaccgccattttgcagcacacggtggacatcaccgagctgcaaacgctgaaagcgtctctgcgctcgacggagatcggcggtcagccgttgcagcagatagaagcctcgatcatctctcgcgccagatcgatgcaggatgaggggaatcagctgcgccagttgttcgctcaggctccgggcttcgtctgcttcctgcgcgggccgcaacatgtcttcgaactggtcaacgaggcatatcagcagcttaccggccatcgcgagctgatcggcaaacgagtgctcgatggcttgccagagcttgaggggcaggcgttcgtaggtttgctcgaccaggtgtaccaatccggcgagccctatatcggaagaggagtgcgggcgctgctgcagcggcgtcccgacacgtcgcccgaagaggttttcgttgatttcgtattccagccgatcttcgagcgtggcgggcaggtctcgggtattttcgtgcagggcagtgatgtgaccgagcaacggcgcaaccaactggaactgcaggcgcatcgcgagcgactcgaggatttggtccgtgaacgaacgcaggagttgacgcgtagcgaatccgagcgacggattgccgaagcggcactgatgcagtcgcagaaactcgaggcggttggcaagctgaccggcggaatcgcccacgacttcaacaatatgctgcagatcatcggtggaaacctgcagttgctgcgccgcaatatcggcgccgacgagacggcgcaaaggcgtctcgactcggcggtcggcggcgtggaaaaaggtgctcgcctggcctcccagttgctcgctttcgccagtcgtcagccactccagccgcagtcggtagacttgggcgaactgctcgatgatatgagcgagttgctgagcggcgcgctgggccgggcagtgcaggtcgatgtcgatacccagccgggcctttggtcggtttacgctgacgtgggcaatctgcaggccgcgatcctcaatctggcggtcaacgctcgtgacgcgatggcggggggaggggctttgtccctgcgcctgcgcaaccgcgagctgggtgccgagcatcttgctgggcaaccggatcttgccgcgggtcccttcgtggagctgagcgtcgtcgatgaaggcgaggggatgagccccgaggttttgtcgcgggtgttcgaaccgttcttcaccacgcgccaggccgccaacgcgtcaggtctggggctgagcatggtttacggcttcgtcaagcagagtggcggtttcgttgtgctcgacagcgaggaaggtcgtggcacgaccgttcgggtttatttgcccagcaacgttggcgaaggccggggcgaagtcggggagtcgcgcgccgaatatccgaccggcaccgcttcgctgaccgtcgacgcggtgcaggagccgtccgatggcctggctattctcttcgtcgaggacgacccgacgttgcgcatgctcaccggcgaggtaatggaagagctcgggcatgacgtcagcctctgcgagtcggccgaggcagcgttggaactgctcgatgagcgccgcttcgacgtgctgttgaccgacgtagggctgaccggtatgagtggtatcgagctggtacggcaggcgaggacgctcgatgcggggttgagcgtggtgattgcgtccggttatgccatcagtgcgcgtgatgaagggctggaggacttgcgcaccatgctcaagccctacgacatccatcaggtccggtccttgctcgaagaaatccaggccgagcgagcccaggctggctcggcgagttgaggctggttaaatattcaccaatgcgccttgcgtgcttggcccgccttctctagaattgcgccccttgcccggatggcaggcgtttgcgcgcctctctggcaggcaagacaacatactcattcactccttgcctgatccgtttcgtgcggcaggctgcaacccgtaaggagcaacaatgcgtcattacgaaatcatctttctggtccaccccgaccagagcgagcaggttggcggcatggtggagcgttacaccaagctgatcgaagaagacggtggcaaaatccatcgtctggaagactggggtcgtcgtcagctggcttacgccatcaacaacgttcacaaggctcactacgtgatgctgaacgtcgagtgcagcggcaaggcactggctgagctggaagacaacttccgctacaacgacgctgtcatccgtaacctggtcatccgtcgcgacgaagccgtgaccgagcagtccgagatgctcaaggccgaggaaaaccgtagcgagcgccgtgagcgtcgtgatcgccctgaatctgacaatgtcaacgaaaacgacaatgacagcgacagccgcgacaacaacgctgacgagtaatccacggacttattgaggagcctatttcatggcacgttttttccgccgtcgtaagttctgccgtttcaccgcagaaaacgtgaaagagatcgactacaaggatctcaacacgctgaaggcctacatttccgaaaccggcaagatcgttcctagccgtatcaccggaaccaaagcacgctatcagcgccagctggctaccgctatcaagcgcgcccgcttcctggccctgctgccctacaccgacagccacggccgttgatcgaactgttcggcaaacgtaaaggatagatcgcatgcgcgccctggctgacttcatcatgcgcggccgtatgcaagcgattgttgtagtagcgggcgctgcggcactgccgatgttgttctggctgtgtgctgccgcgggcagcctggtgttgttgcgtcgcgggttgaatgatgcgctgggtgtgttggtctgggcggttttgccagcgctggcctggtggtatttcggcgatccgcgcacgttgctggtgctgtcggggtcgttcgggttggcgctgctgttgcgcaaccagaacgcctggcaccgagtgatgctgtgcagtgtggggctcgggttgttgtacgcctgggcgcttgggatggtgttcggcgagccgattgcggcgctcgccgccgagttgcagaaagtgttgcccgacatgctgtcggacgcctatcagcagctttcggtggaagagcaagcgcggctgggtgcgttgctgataccggtattgaccggcttgttggcggcgttgctgcagatcaccaccctgctcagtctgatgcttggacgttactggcaggcgctgttgtacaacccgggtggcttcggcctcgagttccgtgcgctgcgtttctcgccagcgccggcgatggtgctcctggcaggcatgctgttagcgccgagcctgggtgtacaggcggcaatgctggctccgctgtgcagcgttccgctggtattcgccggcattgcgctggtgcacgggctggtggcgcagaatcggatgtcgcgattctggctggttgggctttatgtcacgctggcgctgttcatgcagttgctttatccgttactggccatcttggccattgtcgacagcttgtttgattttcgcggtcgggcatctcgtgatgacgatgcgggacctgcgaacggtgaaggttaagttaaagaggtaagactcaaatggaagtcatcctgctggaaaaagtcgcaaacctgggcaacctgggcgacaaggtaaacgtcaagtctggttacggccgcaactatctgctgccgcagcgcaaggctactgctgcaaccccggccaacatcgccgagttcgaagctcgccgtgcagagctggaaaaagctgctgccgagcgtaaggcttctgccgaaactcgtgctgcccagctggctgaactggaagtcaccatcactgcaactgcaggcgatgaaggcaaactgttcggttcgatcggtactcacgacatcgccgacgcactgaccgcctctggcgttgaagtcgcgaagagcgaaatccgtctgccgaacggcaccatccgtcaggttggtgagtacgacgtggccgtgcacctgcacaccgacgtcgaagcgaccgtcaagctgatcgtgattgccggctgagaccagccggcgtctggcacccctggtgcctgacgcgtaacatcgggcacgtttccacgcgagtggagcgtgccttttgtttttgtgaacgttgaagaattacgagtgccatgaacgacatcagtgtgccccaacagtacgacctggaaaccgcagcgctcaaggtgccgccgcattccatcgaggccgaacaggccgtgcttggcggactgatgctggacaacaacgcctgggagcgggtactcgatcaggtttccgatggcgacttctaccgtcatgaccatcggctgattttccgtgccattttcaccctggccgaacgcaactcgccgttcgatgtggtgactctgtctgagcagttggacaaggaagggcatctttcgcaggtgggcggtttggcttacctcggtgaattggcgaagaacaccccgtcggtcgccaacatcaaggcctacgcgcagatcattcgcgagcgtgccacgttgcgccagttgatcggcatcagcaatgagatcgccgacagcgcctatgcgccccagggccgcactggcgaagagatcctcgacgaagccgagcggctgattttccagatcgccgaggcgcgccccaagacgggcgggccgatggggatcaacgatattctggtgaaggcgatcgaccgtatcgattcgctgttcaacgccggcgaggcgatcaccggcctgtcgaccggtttcaccgacctggacgaggccacgagcggcctgcaggcggcggacctgatcatcgtggccggtcgcccttcgatgggcaagacgacctttgccatgaacctggtggaaaacgcggttctgcgttcggacaaggcgattctggtgttctcgctggagatgccggccgactccatcgtcatccgtatgctggcctcgctcggccgtatcgaccagaccaaggtgcggaccggtaagctcagcgacgacgactggccacgactgacctcggcggtgaatctgctcaacgaccgcaagctgttcatcgacgataccgccggcatctcgccttcggaaatgcgcgcccgtacccggcgcctggcacgcgagcacggcgaaatcggcatgatcatggtcgactacctgcagctgatgcagattcccggctccagcggcgacaaccgcaccaacgagatttccgagatctcccgctcgctgaagggtctggccaaggaattcaactgcccggtgatcgcgctgtcgcagctcaaccgctcgctcgagcagcgacccaacaagcggccggtgaactcggacctgcgtgaatccggggcgatcgagcaggacgccgacatcatcatgttcgtctaccgggacgaggtctatcacccggaaaccgaatacaagggcgtcgccgaaatcatcatcggcaagcagcggaatggcccgatcggcacgacacgcctggcgttcctcggcaaatactcgcgcttcgagaacctggcgcccggcagctaccagttcgacgacgaatgattcaggacctgtaaaccggcgacatggcattgcctcgcagatagggcgcgaggtagtcctccagtcgctggccggggcccgtctgaaaggtttcgtcgagctcggccaggctgtccacccggtcgatgcggaagttgcggaagtcgttgcgtaactcgcaccaactgcacagcgtccaggtctggccccagaagaacagccccagcggccagatgcaccgcaggctggcttgcccgctttcgtcgcggtagcccagctgcagtttgcgtcgttgacgaatcgcctgacgcagctgaccgagccagtgcaccggatatgtgttcacctccggggcgaacaggcggttgccgttgagttcgtcacgcagagtggtgggcagcacgctgtggatcttcgccagtgccgattcggcggcccgttgcaggtcggggtcggcccaggcgttgaccatgcgcgcgccaaccaccagggcttcgatttcttcgcgctcgaacatcagcggcggcaggtccatgggttggcgcagcagatagccgacccccgcttcgccctccagcggcacgccggagagcgacagatcctgaatgtctcggtagatggtgcgcaccgagacctgcaggcgttcggccagccactgcgcggtggtcagccggcggctgcgcaggaactggacgatctggaacaggcggtcggcgcgtctcatgctcttccttggcggtggcctggtgagtggctgctcggccagggtggccgggttcaggacatgctgtgcagacccacctcgttgccttcgctgtcttttatcacagcgatgtatccatggggagcgatggacatcttgccctggatgatcacgccgcccgctgccggtactcggttcaccacgtcggccagttgcccttcgacgttcagatagacccgggtgccgccaataccgctttgctgctcgggcgcgtggctcaggcaaccgcccacgccgctgttcgggtcgtaggggaacagcgccatgcgcccgcccatgccgtcgatggtttccagcgtggttgccagggcttgctcatagaagcggcgggcgcgctcgaagtcgctgacgaacaattcgaaccagttgatcgcgttcattttctctctccttggaatgggcaatgtcagcaggccggcgccgcaggtggcgcgctttggcctgcgcaggccactctaggtcagggctactgacagcctggtgtcagcagcgtcgacgggcgctgtctgtggctggtaaaggtgagcgagatcgcccttgttaggcgtgcggctgacttcggactcttcgcattcggagcgcgtatcgatcgatacgggtgcttgcagcctgcggggcgagggttaagatgatcggctccaatctgtcgcagagcccgctccatgcgccccttagtagcaaccgtcgacctgtccgcgattcgtcacaactacaccatggccaaacgctgcgcacccggtcgccgcgccttcgcggtggtcaaggccaacgcctacgggcatggcgcgcgtgaggtggtgacacacttgcgcgaaatcgccgacggcttcgccgtggcgtgcctggaagaggcggaagacattcgcctgagcgccccggacgcacggatcttgctgctcgaaggctgttttgaaccggcggagtatttgcgtgctgccgagttggggctggatgtggccatgcaggatcagcgccaggccgactggctgctcgcctgcgatctaccccggccgctgaacgtctggctgaagctggactcgggcatgcatcggctgggcttcgccgcggaaagcctgcgccagtgccatgcccggctcaaaggttcggcacaggtcgccgaactgaatctgatcagccatttcgcctgcgccgacgagcgcggccattcgttgaccgagttgcagttggagcgttacgcagagctgctggcgctagaattcgacaactgctcgctggccaactccgccgcggtgctgacgctgccgcaggcgcacatggcgtggattcgccccggcatcatgctctatggcgctacgccctttgccgaactgagcgcgcaggagttgggtttgcgcccggtgatgacgttgaccggtgcgctgatcgccgtgcgcgatgtgccacaaggcgaaagcgtcggctatggcgccagctgggtcgcgcaacgcgcctcgcggatcggcaccgtcagctgtggctatgccgatggttacccacgtacagcgccttcgggcacctcggtggtgattcatggccagcgcgtgccgttggccgggcgggtctcgatggacatgctggcagtggatctcaccgatctgccgcaggcgcaggtgggcgatgccgtggagttgtggggcgcgcagatgccaatcgacgagctggcccaggcctgtggcaccatcggctacgagctgctgaccaaggtgaccgggcgggtgccgcggcgctacgtcgattgaccggcaggcagccgttgctcgtcctgctgaacccagtttgcgcggccttgatgcttggcacggtagagcgcctcgtcggccgccttgtagagctgtgagaactcttcggcgtggcgcggaaagaacgcagcaccgacgctgacggtgactgccaggctcatctcaccataggccacgggcttcgaaagctcatgcagcagccgctcggcgatctgggcgacgtcctgctcgactgtcgggccggtcagcagcaccgcgaactcatcccctccaagccgcgcggccatatcgctggtgcgcaccaggccgcgcaggcgctggccgagtgtacgcagcagcaggtcgccggcatcgtggccgtgaccgtcgttgatgggcttgaagtggtccagatcgatgagcaacagggcgatggattcaccgcgacgccgggcatcgctgagcgccatctcgacacgttcgatgagatagcgccggttgggcagttcggtcaaggcgtcatggaaggcgacctgcttgagctcgacttcccgttcgctgagatgccggttggcttcggcgagctcggccgtacgcgtttcgactgccaggctgagctgctcggcgctggcctgaacctgcttcaagcgcgcgctcttttcccggtcggcatgttccagcgctgccgctcgttcctgcttgaggatctggatgcggtaggccaatgcgaaggagaagaggatggattcggccgtcaccgccaacggaaagagataagcattccaggccgcaggctgaaccacgccggtggcgcgcaatagcagcagattgacgctgcccaggatcaccccgaaaccgagcagatagagcagtgccgggaagtaaccctgacgccagcggcggaaggacgcccatagcgaggccggaatcgcggtgagtgccagcgccacgaatacccaggcgccgaacgcacgccagccgaaggcattgagcagcacggcggtgacatagagcatcaaggccaaggtcagcaggcgatgcgcccagggcacgaactggcgtgtctgcagcagcgtctgggtgaagcggcaggcactgaagccccagagcgccgggatgctgattcggtcgagccagaaaggcaccggaacctgcggccagaggtactggaatccatggccggtcatcgccaggatcatcagcagcgcgccggtggtggtcaccacgtaccagaaataggcgctgtcgcgcaggctgaggaagatgaacaggttgtacagcaacatcgccaggatgacgccgtagatcaggccgagaaacaggttttcgcccgcagcctgtccctgcagcgcatcgagttgccagaccttgagcggaaaggagttccccgccgggtcgtagctgcgcagatagaaggtcagcggctgctggtcatcgagcagcggaagccggaaaagcatgcgccgataggggtagtcacggccttcattgaaaccgaccagctcgccggactgccgctccacccagccgccgttgccatcgggcaggtagatgcgaagatccttcagcgtcacagagccgacctccagccaccagtgccgcggcgcatcgcttgtccgccgaaggctgacccggatccaccaggggttcgggctttgcccgacgctggccttgccctgggaaggctggaaacgcgccagcgcctcgggcgtctgcaggtctgtgatgctcagctgggcgcccggatcctcaagcagttcgacctgcgcgttgaggctgcgactgctgtcttcggcgtcgaggctgatcgtctcggcttgaacgctggcgaggccacaaaggctgaggagcaaggcgggaataattgcgcgcaccgggaactcccgaactcgaggcgttgtctgggtcgcgcgagtatacgggctgagcggccgacgtgcgcgcctgtcgtccggacgagaaagaccttgcgcaatggtcgggcttgatcattttttgtgctatattccgcgcccgttttcgttgccccggtttctcgccatgcacgcagccaagcccctgttcgattatcccaagtactgggccgagtgtttcggcccggcaccattcctgccgatgagcagggaggagatggatcagctcggctgggattcgtgcgacatcatcgtcgtcaccggggacgcctacgtcgaccatccgtcgttcggcatggccatcatcggtcgtttgctggaagcccagggctttcgcgtgggcatcatcagccagccggactggcagagcaaagacgacttcatgaagctcggcgagccgaacctgttcttcggtgtcgccgccggcaacatggactcgatgatcaatcgctacaccgccgaccgcaagattcgctcggacgacgcctacaccgcaggcggcctggccggtaagcgccccgatcgcgccagcctggtctacagccagcgctgcaaggaagcctacaagcacgtgccggtggtgctcggtggaatcgaagcctcgctgcgccgcatcgctcactacgactattggtcggacaaggtgcgccgctcgatcctgatggacgccacggccgacgtcctgctctacggcaacgccgagcgggccatcgtcgaggtggcgcagcgtctggcccgtggcgagtcgatcgaggccattaccgatgtgcgcggcaccgcgttcatccgcaaggacacgcccgaaggctggttcgagatcgattccacgcgcatcgaccgtccgggcaagatcgacaagatcatcaatccctacgtcaacacgcaggatatgtccgcctgcgccatcgagaaggaaaaaggtcctcaggacgacccgaacgaggccaagcctgtcgagctgctaccgcacccgaggctggagcgcgatcgtacggtgatccgcctgccgtccttcgaaaaggtgcgcaacgacccggcgctctatgcccacgccaaccgcgtgctgcatctggaaaccaaccccggcaacgcgcgcgcgctggtgcagcgccacgacgatcgcgagctgtggctcaacccgccgccgatcccgctgaccaccgaggaaatggactatgtgttcgccgcaccctatgcgcgcgtgccgcaccctgcctacaacggcgcgaaaatcccggcatacgagatgatccgcttctcggtgaacatcatgcgtggctgctttggtggctgcaccttctgctcgatcaccgaacatgaaggccgcatcatccagagtcgttcccacgagtcgatcctgcacgagatcgaggaaatgaagaacgtgccgggcttcaccggcgtggtttccgacctcggtgggccgaccgccaacatgtatcgcctggcctgcaagagtcatgagatcgagaagcactgccgcaagccgtcctgcgtgttccccggcatctgcgagaacctcgataccgaccacagctcgctgatcgagctgtaccgcaaggcgcgtgcgctgccgggcgtcaagaagatccttatcgcttccggcctgcgctacgacctcgccgtggagtcgccggaatacgtcaaggagctggtcacccaccacgtcggtggctatctcaagatcgcaccggaacacaccgagcgcggcccgctggacaagatgatgaagccgggcatcggcagctacgatcggttcaagcggatgttcgagaagtactcgaaggaggcgggcaaggagcaatacctgattccgtacttcatcgctgcgcatccgggcaccaccgacgaggacatgatgaacctcgcgctctggctcaaggccaacggtttccgcgccgaccaggtgcaggcgttctatccgtcgccgatggcctcggccaccgccatgtaccacaccggcaagaacccgctgcgcaaggtgacctacaagagcgaaggcgtcaccgtggtcaagagcgaggagcagcgccgtctgcacaaagccttcctgcgctatcacgacccgaagggctggccgctgctgcgcgaggcgctgacccgcatgggccgcgccgacctgatcggcagcggcaagcatcagctgatcccggtgcatcagccagccaccgatggctatcagagcgcgcgccgcaagaactcgacgccggccggcagcaagaaagccgggcagggcgggcagatcctcacccagcacaacggcctgccgccacgcagccacgacggcaacgcctgggacaagcgcgagcaggccaaggccgcggccgaagcccggcgcaaggccgcttccggtggtggcaagccgtccggcaagaaccgcaaaccgtcgcagcgtcccgccgtcccgcgctgatgccggcgggcagccgtgctatgagcgcggctgccgtgggcgtgttcagccctggaaggcctgggtggcctgattcagctcgccggccagatgcagcatctgttcgctttgcgcgcggccttgactgatgtgcttcaggttgcggtcgccgagctgatggatacgttcgctgtggccgcggatctcgcttaccgcctcaccctgttgggcggtcgcaagcgcgatctgagcggccatctgttcgatcgagccgatggtgacgacgatctggttgagtgcggcatcggcggtttcggccagctcggcggtcgcctcggcgtgaacgacctgggtgcgcatggcctgtaccgattgttgtgcggcggattgcagtccaccgatcagcaactgaatctcctcggtggcgccactggtgcgttgagcaagcgtgcgcacctcatcggcgactacggcgaagccgcggccctgctcgcctgctcgggcggcttcgatcgcggcgttcagggccagcaggttggtctgctcggcgatcgagcgaatcaccgtcaggactttgccgatggtgccggtctcgtcggccaggcgaccgatggccgaggcgttgtcctgcacttcgctgaccaggtcatgcagcccggccaggctgttgcggatgaccgcctgcccctgattgacggcctggccggctgcgcgcccggcatcggctgtctgttcggcgccgtgggcgacttcgcggatggtcgcttccagctcctcaagggcgtctcgaatctgccgggtatcgctgctctgatcgctggcgctctggtgcagatcgccgctcagctcggccaggctgcggctgttaccggtgacggcccccgcgtgctggcgcagcgtgccgaccagtgttagcaagtagccgcgcaactgaccgagcgagccctctatttctgtcagttcccgcgtattggtgcgcaggacgatggggtcgcgaaagtcgccgctggcccaggtacaaagcgcgggcaccagttgccccagtgaccgggtcagtcgccgttgcaagcgatcgatggccaatgcgatcagcaggatgagaacgatgatcgcaccctggatcaggcgcacctccgcctggattcggccgtactccttgcgaatctcgggttccagctcgtccagcgccgattgcagcgcggcaactcgctggccggtcgcttgcatcagctgtgcccgttgctcgatcagcgcacgcgtgcgctggagttcgccggggtagcgcttgatcaggctggcgagttcgcgcttgagcgcggtgcctctatcttccgttgtctgttccgacgtcgaagtgtcgaggtccagcaaggcagcgaaggtgctggcgccggacgcctgctcgctcatgacgcccagcagcggcagcgcatccagcgttgccatggttttgtcgagtgactgcaacgccagctcggcgtcgctgctaccgtcgctcagtttggctcgcgcgtggctgaggcgaagcagctggcggctcgcttcgaacagcggctgccggtagcgggccgctgcgggatcttcgctgctcatggcgtactggtcgagttgctccagcgctccagccatctcgcgctcggcttgcgacagcaggccggtcggatcgcccgccagtttgcctgccgccaggagttcggtcgccgtgaaccgttggagttgttccaggcttggctgtagtcgttcggcaaaggcccccggcagggtgcgcacgctgggggcgagctgctcgagcgctgtcaccgccgctttgtgttgcaccgcatcgccgctgctcaggtagccctggatgttgcttgcgacctcggtttggaagcgctgggagaggttgaggtagcgctccatcaacgcataggggcgccccaacgcctgttccgaccaccagagcgtggcgccgagcgcgagacagatggtcacgagcagcaaggtgttgagcgtggttagcgacttcagacgcatcctgacctccgggaaatggggaggtcagcaatatatggctatttggtgtcactcctgtgacagggtgtaccgctcgacgcggttacggccgccatgcttggcgcgataaagcgcttcgtctgcctgttgggtcagggacttgatatcggtatcgggggcgagttcggcgatgccgcagctgaaggtacaggagaggtcagccggttgcgccggatagcggatctcggcgaagcgctgacgtatttcgtcgaggaccttcatggcatctcgcgcacaggtatcgggcagcaccaccgcgaattcctcgccgccgtagcggccgatatggtcggtcttgcgcaggcgctgcttgaggaacagggcgaggcttttgatcacgcggtcgcccatggggtgcccgtaggtgtcgttgaccttcttgaagtgatcgatatcgatcatggcgaagcagagagagcggccgtcgcggcgtgcccgcgagctggcgtcttcgagcaactgcaggctgtgcgtatggttgtagagccccgtgaggctatcgcgcacgattctggccttcaggtggcgggctcgctcggcgcgggtgcggaccgtggcgatcaggtggctgggcttgatcggcttggtcaggaagtcatcgcccccttcgttcatcgcatccagctgtttgtccagatcgtcctcggccgacagatagatgatcggtacgctcacatagcgctcatgctggcggatgaccttggccagctcggtgcccatgcactccggcatgtacatgtcgaggatgatcaggtccggctggaattcagccaggtaggtaatggcctggatcggctcgttaagcgtccgggtgattatcccggcgttgttcaggacccgttcggtatgcgtcgcctgggcgcgcgaatcgtcgatgatgagcacccgaaagggctcgtaatgagcggtgcgggtgaagatttcgatcttctccagcaggctggatgcgtcgagcgcgccagtgaagaattccagccctccggcccgtacggcggccaggcgcatgggcgtgtccgtctccgcatggctgaagaagatcaacggcagcttgtcttcgagtccttgctgcacgcgttcggcgagtttcagaccttcaccgggaccgttgaaatcgacgtccatgaccagggcggccgggtggcgctcatgcatggccgcgcggaactcgctgtcggtggcgaatgcccgtgccgtcatgctgaagaattcgagctggcgcaccacgtggctggcgcgctcatggtcttgcagcgcgatgtacacgggtttgctcagcggcgggacgtaaccggattgcccgcgcgggtctccatgattgaggccggtgcgcgcgagccggtagaccagctggctgagcgtggcgatggtgtggctcgacaggcgcccgcggttgtcgttgatgtcgaccaggcagtcgtcgatgcccatggcgagctgccgatgctcggcctggtcgaagcgttcggcgaagcgtcgcaagcgctggttggcatcggcgagcgcggtgcgatagctgtcgttccactcgctgcgttgcagctgctgccagacctcgagcacctcacgtgcctggtgaatgaccctttgcgcgaagtgttgcttcagttcttcctgatccgacatgtccggttccctggcccgctgcacagcgtgttcagaggctgaatagtggcctcatgctaccactgttctggctgttgcgaaggcactgtataggcgccctggttctcattatgaggctcgccgaggaccagctgttatagtggttcacacaccgcgacgcctttcagtgccggtggtcgaaatcttgaattccgaaagaaggactgatgctcatgttggattggaagaaccgccttggccgcttcggctcgtcgggaaacaccgccagagcggaaggggcgggtcgcaatccgctggtactggcgctggctgtggtggtcgggctctatctactggtggcgctgctgattggctggtattggagttccgagccagaccgctttgcggttcagcagcacgtgcgccaggcggccgatggttcgcagcggcagatcgttaacggctacacgacagtcgagacgctcaagcgcgtagccagcacgctgctggacaagccgggcggctatctgaccaacgacatcgctcctcctggcctgtggctggataacatgcccagctgggaatacggcgtgctggttcaggtgcgtgatctcagccgtgcgctgcgcaaggatttcgctcggtctcagtcgcagtcgaccgaggatgccgatctttcgaaagccgagccgttgttcaatttcgacaatcgtagctgggcactgcctgccagtgagtcggaataccgtaacggtattcgctacctggatcgttacctggcgcgtttgagcgatccggcgcccaaggcgcagttctactcgcgcgccgacaacctcaataactggttgggtgatgtgggtacgcggctgggttcgttatcgcagcggctgtcggccagtgtcggccgagtacgtctggatacccagggcgcagccccggagcaggcgccagaacggggccagcaggtgctcgaggagcagcgtgtcgagacgtcctggttgcagatcgacaacgtcttctacgaagcgcgagggcaagcgtgggccctgtcccatctgttgcgtgcgatcgaggtggatttcgccgacgtgctggcgaagaagaacgcggcggtcagcgtgcggcagatcattcgcgagctagaagcggcgcaggaacccctgtggagtccgatggtgctgaacggcagcggttatggcgtgctggccaaccattcgctggtgatggccaactacatttcgcgtgccaacgcggcgatcatcgatttgcgcaatctgctgacgcaggggtgagacgggaagacgatcgaagcgctgaaggctggaaagctgagcggtgagggcggcttgaagagcgtctggctggggctcgtacactggacggcctccagccttgctcaatccagcccgagtttcttcaggcgataacgcatggaacggaacgacagacccagccgctgagcggcagcggtgcggttccagcgtgtttcttccagcgcctgcatgatcagcttgcgctcaacctcttcgaggtggtcttccagattgtcgatctgcgccagactcgcttcgccatgctccggtatgcccggcgcgtcagagagacgcaggtcgctgggtttgatctcctcaccctcgcagagcgtgtaggcgcgctccagcatgttttccagctcgcgtacgttgcccgggaaccgatagctttgcagcttcgccaacgcatcgggatgcagccgcgctgcggtatcgccacagtcgctggcgaggcgatgaagcatgacgtcggccagctgcgcgatgtcttcgcgacgttcacgcaggggcggcacgcgcaactcgatgacgttcaagcggtaatagaggtcctggcgaaaacggcccgcggcgacttcgctggcgaggtccttgtgcgtggcgcagagaatccgcacatcaaccaccacctccttggcgcccccgaccgcacgcacggccttttcctggatcgctcggagcagcttgacctgcatcggcaggggaaggtcggctacttcgtcgaggaacaaggtgccgccgttggccgcctggaacagccccggtttgtcttccatggcaccggtgaaactgcccttcttgtgtccgaagaactcgctttccatcagttccgaagggatcgcgccgcagttgaccggaacgaagggccgctcgtggcgtggcccctgttcgtggatcagccgcgccaccagctccttgccactgccggattcgccgctgatatagaccggtgcctggctgcgcgccagtttgccgatctgtttgcgcagcaggttcatcggcggcgacgcgccgagcaagcggttgtcgaccgataacgcgttggggttcgggctgcgaagccggagcgcggtgttcaccagctcgcgcagacggcccagatccaccggcttggtcaggaaatcgaacgcaccggccttgagcgcgccgatggcggtatccaggctgccgtaggcggtgatcatcgccacgggcaattgcgggtactgctgctggatgaattgcaccagctccagcccgcagccatcgggcaggcgcatgtcggtgaggcagagatcgtagtgctcacgcgccagacactcgcgtgcttccttgaggttgcgggcactgcgggtgtcgagcttcatgcgcccgagggtgatctccaggagttccctgatatcgggttcgtcatcgatgatcaacgctttctggcgggcggtcatggtcttggtcttttagctgacgatggatggcgcgggccgcaatgttaacgccgccgggcgtgatttgtaccgccacggtggtcgatgtgtgacctgttgcccctcggttggcctcagcccagcttgcgcgggtgagcgaagacgatgcggaaacaactgccgccttcgtctcgttgacgatagtccagacgcgcctgattgctttcgcagagctcgcgggaaatatacaggcccaggccggtgcccttgctttcggtggtgaagaatggctcgaagatattctgcagttgttcgggcgccactcccgggccgtcgtcgagtatctcgagcaccggcaggtcgctggcctcgtcgcgaaacacgcgcagccatacctgagcctgctggtgctgctggccgctgtagcgcaggccgttctgcaccaggttggtcaagacctggatgagctggttcggatccatgcgggtctgcagcgagctgccttgggtttccacgtgcaggcgctgattggcaggtaggctttcgcgacactcgctggcgaatcgatgaatccagtatttcaggtcgagtagttgtggttcggcctggcgacggcgcgacagctgcagcacgttctcgatgaccagattcatgcgccgcgagtgatcctggatgatttgcgtaaggcgcagatcagcggcgtccagtgcttcggactcctgcaatagttgcgcggcgtggctgatggcgccaaggggattgcggatctcgtgggcgatgctggcggtcagtcggccgagggacgcgagtttgagctgctgcgccttttgcgtgatctgcgagatgtcctcgaggaagaccagggtgtcctgcttcacgccatgctgcagcatggcgaagctcggctgcagcgtggcgccgtccggtattgccttgaagttgcgtggtcgcagggttgggttgtcccgccattgctgcaaggccttgagcaggtcggggcagcgaggggcgaggcgttcgccgatcagctcttgttgaccaagcaattccagggcgccctgattggcaagcagtacgcgttcctgcggatcgagcacgaggattccggtgcgcattcgctgcaggatctgagcgttcaaggcttcgagattggcgacttcctcggcgcgctgacgtgccaggctctcgctgacctgtagtcgcctcgtcagcccttgcaccagcagcgcggcggcaaagcaaagcgtgccgagtgccgcagcctgaacatactgactgcttgcggcgctatcgctgaggttgagatagaacgtcaggtagatgaggccggtagcggcgactgcggcgatgaagaagccgatgcggccatgcagcaggatattggcaatggcgactgcgacaatcagcaggttgccgattccgcttggcgtgccgccggcaaaatagaacagggccgccagcagggtcacatccagcagggcaagggccagcaccggtagttcgcgcttgggattctgcagcagtaccgcgacgaggatgttgagaatcaggtacagccaggcgccgtagtgaaacgccgccgggttgctcatgtgcatcaggtcgttgtgcaggtcgctgctgatgagcagtaccagcaccaggccgatcgcgacgcgatagaggtgatagagccggaggattcgccggccctggtgaccgagaaacgtcaggctctcagtggccacccgaagcgctgccctggtccagatgcgcctggctgcagtaccagtggtcatgacgctgcagcgcctgttcccgaggcaggtgcacgccgcattcggcacagcggaccatggtcacggtggtctgttgcgtcttgccggtcgatgtcggtttgttggtcaggcgacgccatagccagatggcggcagcgatcaggatgatccagaacaacagacgaaacagccccatatttctacttcctggctaagccgtgagggcctgccggattcggcaggctgcgacagggcgatcagtcgaacaggccaaaggtcaggtagctccaccaggagcggctcttgcgttgctcttcgctggccgcgtcagcttccgcttctttcaataccgggcgcagttcatcaggaagatcctgggcggcattctcatactggcgcaccacgtcgcggttggattgggagacgtctggcgccttggtttcggtctcgatcaacccgagggttgcacgggacagccagctgcggttgtcctcctccttttcccgcggtacgaactcgccgccgtcgaggctgggatggtccggatagttgagcttgagggtttccaggctgctatcggcgagctcgttcagccccatgtgctgataggcctcggtcatcaccgccagcccgtcgccgaccgaaggggtaccctggaagttttccacgacgtaacggcctcggttggcggccgctacgtaagcctggcggcgcaagtagtagtcggcgacatggatctcgttggcggccagcaggttgcgcaggtagatcatgcgagccttggcatccggcgcgtagcggctattgggatagcgtgtggtcagttgtgcgaattcgttgaacgagtcacgcgcagcgcccgggtcgcgcttggtcatgtccaacggcaggaaccgcgccagcagtccgcgatcctgatcgaaggacgccaatcctttcagatagtaggcgtagtcgacgctgggatgctgtgggtgcaggcggatgaagcgctcggcggaggaacgcgcggcttccggttcggtgttgcggtagtaggcgtagatcagttccagctgcgcctgttcggcgaagcggccgaaggggtagcgtgactccagggccttcagcttgttgatggcgctggtgtagctcttgctgtccaggtcggcctgtgcctgccggtacagttccgcttcgccaaggttttcgctaatggtttcgttggatgaacaggcagcgtttagggcgaaaatggcgatcagcagcaggtgtttcacttgcatggcggcttgcgtccctgtgacggctggctgtctcgcgcggagccgtcctgttatgatgggcgccccggctggccgggacaaagacgccgtatttaaacacaagcctgtggctgaaaccaaaagctccacccgtgccactgcacgaagcgtgcatgcccgtcgtcgagctgcccttcgcgcggcaagccagccgcccaggtattgcgctcctgtttgccagccactgcctgatcgccatttcgttagccgaaccgcagcgttttgcctcttcctacttatgaagcgcccttaattatgtccacgctctccactcaggccatccatcttcgtgccgaggtgccgttcgaccttggcgggcagcgcctcgaccaggttgcggcgcaactgttctcggagcattcgcgctcgcgtctggcagcctggatcaaggaaggacggctcacggtcgacggcgacgtgctgcgtcctcgcgacaccgtgcatgcaggtgccattctggagctgtctgccgagcagcaggctcagggcgaatgggtggcgcaggacattgcactggatatcgtgttcgaggacgagcacatcctcgtgctgaacaaaccggccggtctcgtggtgcatccggcagcgggacacgccgacggcacgctgctcaatgcgctgctgcatcatgtgcccgacatcatcaatgtgccgcgcgcaggcatcgttcatcgattggacaaggacaccaccgggctgatggtcgtcgccaagacgctgcaggcacagacgcgcctggtcgagcagatgcaggcgcgcagcgtcagccgcatttatgaggccatcgtgatcggcgtgatcataaccggcggtaccgttgacgcaccgatcggacgccatggccaacagcgccagcgcatggcggtggtcgagggcggtaagcccgcggtgagtcattatcgtgtgctggagcgcttccgctcgcacacccatgtccgggtcaagctggaaaccgggcgtacgcaccagattcgcgtacacatgacgcacatcggttatccgttggtaggagatccgctctacagcgggcgtttccgcatccctcccgcagccaatccgaccatggtgcagaccctgaaggattttccgcgtcaggcgctgcatgcgcgttttctcgagctggatcatccgatcagtggcgaacggatgaagtgggaatcgccgttgcccgacgatttcgtctggttgttgaccttgctgcagcaggaccgcgaggccttcgtcggatgagcgaatggcctggcgactggattcttcccgagtggccagtgccgtcgcacgttcgggcgtgtgtcaccacgcgagagggcggggtcagtcaggcgcctttcgacagcttcaacctgggcgaccacgtcggcgatgccccgaacgccgtggtcgccaatcggcaacagctgcagcgggtgctcggctgcgagcctgcctggatgaatcaggtgcattcgagtatcgcgatcgaagccgatcctcgacgccgtcccaccgccgatgccagctggacgggtgaagccggcatcgcctgtgcggtgctgaccgccgattgcctgccggtactcttcagtgatcgcgcaggttcccgggtagccgcggcgcatgccggctggcgcgggttggccggcggggtgctcgaggcgaccgtggcggcaatggcaattcctggggaccaactgctggcctggctcggtccggcaatcgggcccgatgcgttcgaggtggggccggaagtgcgcgactccttcgtgtcccggcatgccgcggccgccgatgccttttccgccagcagcaatgccggccgttacatggctgacatctatcggcttgcccggctgcatctggctgcctgcggcgtcaccgccgtcttcggtggcggctactgcaccgtgggcgaccctcgcttctattcctatcgccgtgcagcccgtaccggccgtttcgccagtctgatctggctcgactgaatcgtcgcgacggctttgtcgccggtagaacctgctcgtacaggtggttgcggtgctttttgtaggagctgcctctggctgcgaccgggggtgagtgtccggcctgctggcccgccccggaaacaagtgccggggctgacttggatcaatgccacctggcttgaatctccaacaatcaaccttatctaagttccatctcgcaggcttttgtcgaggtgcgattgaatgcgccggcctgcctaaccagaaaaggtgatgacatgcgtatcgatcgtttgaccagcaagctgcagcttgcgctttccgacgcccagtccatcgcggtcggcctcgatcatccgtccatcgagccgctgcatttgatgcaggcgttgctcgaccagcagggcgggtcgattcggccactgttgatgcaggtgggtttcgacatcaatggcctgcgccaggcactgaccaaggaactcgaccaactgccgaaactgcagaacccgacgggcgacatgaacatgtcgcaagatctggcgcgcctgctcaatcaggccgaccgcctggcgcaacagaaaggcgatcagtacatctcgagcgagttggtactgctcgcggcgctcgatagcaatacccgcctgggcaagctcttgctggctcagggcgtgagcaagaaggcgctggagaatgccatcagcaacctgcgcggtggcgatgccgtcaacgaccccaatgcagaagagtcgcgtcaggcgctggataaatacaccgtcgacatgaccaagcgcgccgaggagggcaagctcgatccggtgatcggccgcgatgacgagattcggcggaccattcaggtgctgcaacggcgcaccaagaacaaccccgtgctgatcggtgaacccggcgtcggcaagaccgccatcgtcgaagggctggcccagcgtatcgtcaatggcgaagtgcccgatgggctcaaggacaagcgcctgctggcgctggacatgggctcgctgatcgccggcgccaagttccgcggcgagttcgaagagcgcctcaaggcagtgctcaacgagctgagcaaacaggaggggcgcgtcattctgttcatcgacgagctgcataccatggtcggcgccggcaaagccgagggcgccatggacgccggcaacatgctcaagccagcgctggctcggggtgagttgcattgcgtcggcgcgaccacgctcgatgaatatcgccagtacatcgagaaggatgcggcgctggagcggcgtttccagcgcgtgcaggtcgacgagccgagcgaggaagacaccattgccattctgcgtggcctgaaggaacgctacgaagtgcaccacggtgtttccatcaccgacggcgcgatcatcgcggcggccaagctctcgcatcgctacatcaccgaccggcaattgccggacaaggccatcgacctgatcgacgaggcggccagccgtatccgcatggagatcgactccaaaccggaggagctggatcgcctggaccggcgcctgatccagcttaagatcgagcgtgaggcgctgaagaacgaagacgacgaagcgaccaagaagcgcctggccaagctcgacgatgagatcgtcaagctggagcgtgagtacgccgatctcgaggagatctggaagtccgaaaaggccgaagtgcagggctccgctcagatgcagcagaagatcgagcaggccaaggcggatctcgaggctgcgcggcgcaagggcgacctgtcgcggatggccgagttgcagtacggcatcattcctgacctggaacgcagcctgcagatggtcgaccagcacggcaagacggaaaaccagctgttgcgcaatcgcgtgacggacgaggaaatcgccgaagtcgtgtcgaagtggaccggcattccagtgtcgaagatgctcgagggcgagcgcgagaagctgctgaagatggaagacctgctgcaccagcgcgtgatcgggcagcacgatgcggtagtctcggtcgccaatgcggtgcgtcgttcgcgtgcgggattggccgatccgaaccgccccagcggctccttcctctttctcggcccgaccggcgtgggcaagaccgaactgtgcaaggcgctggccgaattcctcttcgacaccgaagaggcgatgatccgcatcgacatgtccgagttcatggagaagcattcggtggcgcgtctgatcggtgccccgccgggctacgtggggtacgaggagggcggttacctgaccgaggcggtgcgccgtaagccgtattcggtggtgctgctggacgaggtcgagaaggcgcactcggacgttttcaacattctcctgcaggtgctcgaagacggccggctgaccgacagtcacggccgcacggtggatttccgcaataccgtgatcgtgatgacctcgaacctgggctcgagccagatccaggaactggtgggcgatccggatgcgcagcgcgcagcggtcatggacgcggtgagcagccacttccggccggagttcatcaaccgaatcgatgaagtggtggtgttcgatccgctggcacgcgagcagattgcgggcattgcgcagatccagctggggcgcctgcggcaacgtctggcagagcgtgatctgagcctggagctcagcgacgaggccatggacaagctggtcgcggtgggctacgacccggtctatggcgcacggccgctgaaacgcgccattcagcgctggatcgagaacccgctggcgcagaatatactgtctggcgccttcgagccgggttcgtccatcgtcggcaaggtggagggcgacgaaatacatttcgccaaggcctgagtggggccggcagagtcgtccgcggagggcggctctgccgacgctccgatgtcgctcgcaacgtattgtagtaaatcgcattttttctgttgacaggcgcgtcgagaaccgtaaaatggcgcgcctctgaggggggtttgcaaggcagtacagcaagccatccgaggagctggaagtgatagttccgcgatagctcagtcggtagagcaaatgactgttaatcattgggtcccaggttcgagtcctggtcgcggagccaatttccaatcggggtatagcgcagtccggtagcgcgcctgctttgggagcaggatgtcgggagttcgaatccccctaccccgaccaatttagggtcgttagctcagttggtagagcagttggcttttaaccaattggtcgtaggttcgaatcctacacgacccaccaaaccgcctgaacaaggccaaagaaaccggaagatcccgagcggatcttccggttttttattgcctgtcattcggggctggcgcctgcattgaaggcccaggcttccagcgcctcctgaaagggggaggcgctgtcacgctggctatctcaatgcagcttgaggcggggtacggtgctggtactgagcttgtcgccgatcatcatcagccccgtgcgagcgacgccatacagcgcgatctggtgcatccggtacagcgaaacatagaacatcctcgccagccagccctccagcatgacgttgccggtgaggttgcccatcaggttgccgactgcggaaaagctcgacagcgagatcagcgagccgtagtcgcggtaacgatagctcggcaggctctcgccacgcaggcgccgggacagcgatttgaccagcagcgaagcctgctggtgcgctgcctgggctcgcggcggaacgttgcgatcactgtctggctgtgggcaggcggcgcagtcgccgaaggcgaatatgtcctcgtctcgggtggtctgcagcgtcggcagcacttgcagctggttgatccggttggtctccaggccgtccagttcatgcaggaagctcggcgcccggatgcctgctgcccatactttcaacgtcgcgggtacgaagtcgccgttcgttgtgtgcaaaccttcttcggtcacttcgctgaccgcggcgtcggtgagcacggtgacgcccaggttgccaagcgtctggtgcacgggttggctgatgcgctccggtagcgctggcaggacgcgtgggccggcttcgatgagcgtgatatggacgtcttccggcttgatgccgtccagtccataggcggcaagttcgcgtgcggcatggtgcagttcggcagccagctcgacccctgttgcgccggcaccgacgatggccatgttgatggtgccttggcggccttcgctggcgtgggcgcgcatgtagtggctgagcaggtggcgatgaaagcgctcggcctgctcacgggtgtcgaggaagatgcagtgctctgcggcgcccttggtgccgaagtcattggtcgtgctaccgacggcgatcaccagagtgtcataggcgagtgtgcgggccggcaccagctcgatgccatgctcgtcgaacgatggggccaggtgaacgcatttgcgctcgcgctccaggccgcacatgcggcccatctggaactcgaagtggttccatttggcttgggcgacgtaattgagttcgtcggcggacgaattcagcgagccggcggccacctcgtgcagaaggggcttccagatgtgcgtcaggttggcgtcaatcagcgtgatgtgggccttgccgcgcttgcccagggttctacccaggcgggtggcaagctccaggccgccggcgccgccgccgacgattacgatgcgatgtgtcatggaatgaactcataaggctttgcggaattcggtcgagtgcgaggggcagggcggcgacggtcatgtcaccagcccgctcaggaggcggctcagcaggcccaggccaacgactacgaccagaaccagcaccaggagcagccagggcctgaatggccggcgctcgacttggtgctgaggcacgctgaggtactgatcgacgcgtttctggtcttctggattcaggcggctgggcataggcacctcgaaagggaatgcgggcattctagcggtgcgacgacaaaagccaagcgcagcggcggtggagcgcgctggctcgcgtgcaaaagcgttgcgggatgcggaccccgtcaatcagacggagccaggtccgagggcgcggcgatcgccggcctagcgcccgttatgcttcaggctgcgcaggttgccgatcaccgattccagcgcgcggtcgaaaagcaacgcatcattgagcaggcgaatcgcaccgcgacgaaattcgatggctagccctgttcgggtcttttccagcaccttcatcccggtgcggttgacgaagatgtatttccccgtgggtttgatgatcgcggcaagcttgcagcgaagcttgtgatcctcgtcttcctggaactccacccagctgccgacgcgcagattgtcgacctgggtgagcgcctcgtcgttgtcggccagattgatctccggttcctgctcgcggctttcgccgggagccagcaggatgatctcctcgttgacttcgaccatcggggcgagggtggcggcctcctcggcgggttcttcgcgcggcggcagctccagcttctgttcggtgaaaagcctgtcgtgcgagccggtatccctggctggtgctgcgggcgccggttcgatggtcgggttgagttgctgcagcgtttggacgtgcaacgcttcgagccgggtgaagaaatcgctggtggagaaggggtcgaacgctgcgctggccaggccctcgcgcagattcttcagcaggctgggaaccagttccagcagccgcgcccgggcttcgggcgcctcgtgcggtgtcacgctccagatcagatcgtccatggtggtcagcgcagcctgccactgttccgactgggtgccgtgcttgaggcatgtcagcagaaggactttgctccaggcttcttgcagcaggcggaccaccacctccggcagggtctttcccagcaggcgctgattgagcgcatgttcgacttccttgcgcgccatttccgccttggcacgcccttcttcagcgtcgcgcgtgcgctgttcgaggagttcgctgcgacggcgctcgtcgccagtgaaggccaggaagtcggcaagcagttcggagaagatcgtcggatcgtcgacgaagtcgttgagcaggcgggacacgacttgctcgatcttctggtacaggctgtctcgttgagtctcgtcctgatcgacccagcccatcgctgccgaggcgatctcgttgagcagacgtcgggccgggtggctgccccggctgaagaaggtcttgtccagtaccgcgactttcaggaccgggatctgcaggcgaccgatcagtgccttgagcgagtccggcagggtgcgatcgtcaagaatgaattcgaacagcatcgacaccaggttgatgacgtcttcgtcgacctcgccgaccacccgtgacttgccgctcttggcgctgacccggtgcagcagttgctcgagctgagcttgcaggtcatattcgtcgatctgttgaggggcgcgcgactgcaggtgcgagagcagtcgcatcaggtcattgctggatatcgggacggcgtcgctcggcaggtttcgggccggcagtgcactgccgcgcaactccgagagcagtgcttgcaggctgccgaacgcttcctggacatcgtcgttcgcgtaggttggcgatgcttcgccagcgcccgccgcggaccgcggcgcggctctgcctggcgcgcctgaacggctcgtcgagcggcgcggtggcatggattgcagttccggcagaatgccagcggcgaccaggatctggttcgattcggcgtagagttgttcaaggtcggcgagtacgtagcgctcgaacagcttcaggatgatcagcttgacctttatctcgacgccaaggctatggcaggcatcgaggaaatattcgcacaactgctgtggacccaacgggttgttcttgtcatcgagctttctgctcaccagcacgttcatgcgagtggtcagatggctaagcggctggctggcgcggctcatcaccttggcgaccatggtgtcgatcgcgactgattcttccagctcgtcgttctgtaccagggccaggctgtcgaacgacgcctcctgttgggcgggcttgccgatttcgtactggttgagcttggcgaaggactcgaaaacctgctgaaggaagctgcgctcgataccgcgccgcttcatgcgcaggtcgcgcatggcttcgaaaaaagcgttctgttcggcattgctggtggcgcgatcggcgatctcgaagagcgagtcgtcggcattgtcgaagagcgtttgcaacgccaaccgcaactgctgtgcggctttatcgcgcacgctgataagcgcgaccggcaatctgcctgccgtcgaggtcggcttttgctcaggggcggccttcaggtgcaccactttcccatcggttcgcatcgagactctccggtcgcctagctgatcaagcgcgctcaatgaacaggtagcatgccgttgattacagacgggagcaacggcatgtgaatctaatggcgagaagccgccattccagtggcgtcaatttctagcggcattatatgcatcttattcgttagcctagcgcggttttgttttggatatgacacggctcacagatactcagcggtatttcctacagacggtcaacttccccctgcgcctcgaataccgaggtcaaagcggttgtctgcaacggtctggcatgctgctcgctggcgagcctacgccttatactccaccgatttcatagggagctcgtcgtgaccaatatcactctagcggacctgtccgctgaaattgagagcaatgtacgtaaagcgctgagcgaggatgttggaaccggtgacatcactgcgcaactgatccccgccgagcggcttgggcatgctgcagtcatcactcgcgagccggcggtgatcagtggcacggcatgggtggatgccgtgttccggcagttggattcgcgagtggccgtgcattggcaggtcgtcgacggcgagcgggttaaggccgatcgcgtcctgtttcatatcgaggggcctgcacgggcactgctcagcggagaacgcgccgcgctgaatttcctgcagacgttatcgggcgtcgccacgcgctgccggcattatgccgatctcgtcgaaggtacgggcgtgcgcctgctcgatacccgcaagaccttgcccggcttgcgtctggcgcagaagtacgccgtcacctgcggcggctgccataaccatcgaatcggtctctacgatgccttcctgatcaaggaaaaccacattgccgccagcggcgggatttccgaggccgttgcggctgctcaccggattgcacctggcaagcctgtggaagtcgaggtggagaatcttgacgagctggagcaggccctgcgggccggtgccgatgtggtcatgctcgacgagttgagtctcgccgacatgcgagtcgcggtgggtatggcggccggaagggcgaagctggaggcgtcgggcgggatcgatgacgagtcgctgcgtgcgattgccgaaaccggggtggattacatttcgatcggcgccctgaccaagcatgttcgggcgatcgatctgtcgatgcgtctacggcagtgacgcgtggacggcggcgccgaggcgccgccgattcgctcagtgcttgctcttcaggccgaaattctcatgcagcgtgcccggtacgtcggcatctttcggtgcgtagtccttcggcggctcggtgaaggtcggggagttgaggcgttcccgatggccgtggctttcttcgctgtgcagcgcggcgagcagacgctgacgggtctgttcatcgagggcgagtttgtcggcgccctcggacagatgatcctgcatgtcctgatagctattggtcagcttgcgcaacaggctggcggtcgtattgaagtgggtgaccacttcgctctggtaggtatcgaagcgctcctgcagttcatccacctgacgctgtgtgctgttcggtgcgctgtttcgcgcaatcagatagccgatagcgatgccggcaatcacaccgacgattgggagcaaccaggtcgcgagggtctgttccacgagtacttcctctatatgaacggcttgcaatgcaggccgtgaaaaaacatgtggtggagatcaggcgcagtggctttcaggccagaacgcgactgatgtccgggtactgcaccgccctgggcagtggttttcccacggcctgatacgttaacgtctcgtacctgccctgtataccgcgacgcactgcgaagcggcctcaggcgacgtgtaagcaagacgagtcgacgagccccaaggtcacggagttactttgttgaaacgtgaaaacaccatttccatcgagggtcccgccggcgtgctggaaggcctgcatttcgatcagcccgatgcgcgcggcctggcgctgatctgtcatcccaacccggtcaagggcgggaccatgctcaacaaggtggtctctacgctgcagcgtacggcgcgtgacgccgggtatgccacgctgcgcttcaatttccgcggcgtcggtgcaagcgccggagatcatgatatgaacaccggagaggtcgacgacgccgaagcggcgttgcgctggctgcgcgaccggcacccggggctgccgctgacgctgctgggcttttccttcggtggtttcgttgcggcggcgctggccggccggctcgaggcgcgtggcgagtcgctggaacgcctcttcatgatcgcgccggcagtctcgcggttggacggcttgccattggccgagcagtgcgcgttgaccatcatccagccggacgacgacgaggtgatcgacccagcctcggtgcacgcattctccgatgcgcttggccgtccccatgaactgctgaaagtggcagaatgcggccactttttccacggcaagctggtggacctcaaagaactggtggcgccacggctggcctagcaggtcggcaattgcccgggcggttgccgacgagccgtcggtgtgaccgttcgcggctcgctagctgcctgcgctgattgaatcgagataatcgtatgaaaacccgaatccttaccggtatcaccactaccggcacgcctcatctgggcaactatgccggggcgatccggccggcaatcgtggccagccgagcagccgatgccgactccttctacttcctcgccgactaccatgcgctgatcaaatgcgacgaccctgtgcgcatccagcaatcgaggctggagatcgccgccacctggctggcctgcggcctggatgccgagcgcgtgaccttctatcgtcaatccgatatcccggaaatccccgaactgacctggttgttgacctgtgttgccggcaagggcctgctcaaccgcgcccatgcctacaaggcctcggtggataagaacgtcgagctgggcgaggatccggacgccggcatcacaatggggttgttcagctatccggtgctgatggcggccgacattctcatgttcaacgcccacaaggtcccggttggccgcgaccagattcagcacgtggaaatggcccgcgacatcggccagcgcttcaaccacctgttcggcaaaggcaaggaattgttcaccctgcccgctgccgtgatcgaagagggcgtggcgacactgccgggactcgacgggcgcaagatgtccaagagctacgacaacaccatcccgctgttcgccagccccaaggcgctgaaaagcaccatcgctcgtatcgtcaccgactcgaaactgccgggcgaacccaaggacccggacgattctcatctgttcaccatttaccaggcgttcgccacgccgacgcagctggcggctttccgtgccgagttgatcgacgggctggcctggggcgaggccaagcagcgcctgttccagttgctcgacgacgaactgggcgaagcgcgcgagcgttatcacacgctgatacagcgtcccggcgagctggaggacattttgcaggcgggtgccgccaaggcgcgcaaggtggccacgccattcctgggcgagctgcgcgaagcggtcgggctgcgcaatttccgcagcgaagtgaccagcgccgcaccgaccaagaagaaaagcggcaaggcggcccgtttcgccagcttccgcgaggatgacggcagcttccgtttccgctttttcgcggccgatggcgaggagctgttgctgtcacgccccttcggcgatcccaaggcgatcggcggaatcactcagcgcctgatcggccagggcgtggacgccttggaactccgtgccgacgaaggtaatcaatttaccttgtggctggacgggcaatgcattgccgacagccctggttacgccgatgaagaggcgctggacgctgccatgctgcgcctgcgccaggcactggcgacactctgcgtgtagccctgcggcgttcgccgtcgccactggcggcgaaccgccgtcgatcccctgtatcacttgaggctcaagcgcttgaacgacctgcgtaaattgccatccaccgagggcgcggctaaagtgtcggccccgtttcactacccagaccccgccatgacccctcttgagcgctatcaggaagacctgaaacgtcccgatttctttcacgatgccgcccaggaaaatgcggtgcgtcatctgcagcgcctgtacgacgatctggtggccgaagatcggcataagtccgggctgttcggcaagctgttcggcaagaagcagcaggcaccggtcaagggcatttatttctggggcggcgtcggccgcggcaagacttatctggtcgatacctttttcgatgccctgccgttcgagcagaaaacccgcacccactttcaccgcttcatgaagcgtgtgcatgaggaaatgcgcaccctcaagggcgaaaagaacccgctgaccatcatcggcaagcgctttgccgacgagtcgcgagtgatctgcttcgacgagttcttcgtatcggatatcaccgacgcgatgatcctggcgacgctgctcgaggagctgttcaaaaatggcgtgagcctggtggcgacgtccaacatcgtcccggacggcctgtacaaggacggcttgcagcgcgcccgctttctgccggcgatcgagctactgaagaagcacaccgagatcgttaacgtcgacagcggcatcgattaccgcctgcgcgccctggaacaggccgagctttatcatttcccgctggatgccgaggcggagcaaagcctggagaagagcttccgcagcttgctgccggagcagtgccgggtccaggaaaacgaagcgctgatgatcgaaaaccgcgaaatcatcgcgcgcaaggccgcgggcggcgtcggctggttcgaattccgcgagctttgcgacggtccgcgtagccagaacgattacatcgaactgggcaagatcttcgatgcggtgctggtggccaacatcgagcggatggacgtatccaaggacgatatggcgcggcgcttcatcaacatggttgacgagttctacgaccgcaacgtcaagctgatcctctccgccgaggtcgagctgaaggacctctacgccggtggccgcctggagttcgaattccagcgcaccctgagccgcttgctggaaatgcagtcgcatgaatacctggcgcgcccgcacaaaccctgacggcaaaaagacggcgagagcgctggaggctaaaggctcaacgagctggcagcctcgaagagggcgctcccgttctcgaagccgggcaaagcgccaggacttacgcaacactcatcccaggcctccagcctccagcctccagcctccagcctccagcctccagccctcaaccgctcttcaagcgatattgctgccggtattggttcggcgatagctcggtatgctggcggaacaagcgtgcgaagaagctcgcatcgtcgtagccgacttcgtagctgatggtcttgatgctcttgcgggtggtggagagcagcgtcttcgccgtctcgatgcgcagtcgttgcagatagtgcagcggcttgtcgccggttgccgtctgaaatcgccgcatgaagttgcgaatgctcatgccatggtcgcgcgccacgtcctcgaagcggaatttctccgcgaaatgctcttcaagccattcctgaatctgcaggacgcgagtgtccagatgcaatttttggccgccgaaaccgatgcgtccagggctgtagttgcgctgcacctcgaagagaatgtctcgggccatgccttgcgcgacgtgtgcgccgcagaagcgttcgaccagatgcatgtacagatcacaggccgaggtcgtgccgcctgcgcaatacaggttgtcgctgtcggtcatgtgtttttcctggacgaacaacaccctggggaaccgctcggcgaactcccgcgcgaaacgccagtgcgtggtggcttcgcgctcgtcgagcaatcccgcggcggccatccagaacgcgcccgaggcttcgccgcagatcgcgctgcccgctgcgtgtcgcgcctgtagccagggcgcgacttgagggtactgctggcaaagcacgtcgaaatccgcccagaaggccggcaggatgaccgcatcggcttcgcccagcgctccgtccacttcgatacgagggccgctgaaggtgctgacgggacgtccgtcagggctcaccagcacggtttcgaacgcgggagtaaggtccagtccctgctgcttgccataccgcaagctggccatgtgaaagaaatccttggcgtgcagcagagtggatgcgaacactccatcggttgccagaatgctgatacgtcgcaaaggttgggcgctgagcatgcgttgtctactgccggttccgtttgtttttataggtacaaagcagggtaaaactgccgtgggtcggcgggagcgtcttattttttggtctgactgtccagtcaaacgtcgatcctctttgagaggaaccgcgcaggccaggggccgtcagatgaggacagagaggtttttatgcgcgcaaatacaccgcaacccttagccgaagccttcagcggctgggacggtagccccgccaatgcccgtgagatgcagaaacagctggccggccaggtcgtgctggaagacgacttcggcccgttgcgcctgatagccggcgtcgacgtggggtttgaggaggcgggcaagattacccgcgcggcggtggtactgctcgatgccgatacgctcgagccagtggcgcaaaccgtggcgcgggtgccgacctgcatgccctatatccccggcctgctctcctttcgcgaattgccggcggtactgcaggcgctggactcgcttgggcaggtgcctgatctgatcttttccgacgggcacggcatcgcgcatccgcgtggcctcggtatcgccgcgcatctgggggtgatcaccggcctgccgaccatcggtgtggcgaagaaaatcctgaccggccagcacgaggcccttggcgaacagcgtggcgatcaggtcgagctgttcgacaaggccggccatgtgatcggcaccgtgctgcgtagcaaggacaaggtgcgccccctgatcgtctcaccgggtaaccgggtcagcctggaaaccgcgccgcaactggtgatgcgctatgtcacccgctaccggttgccggaacccacacggcttgccgatcggctggcctcgcgtcgtgatgaaaagcgcgctggtagccagcgaagcatggatctggagtagcgcgtccgacttgcagccggcgggtcccaggcgatagcctgcaaaccccgcaggttacccagggttcgccccgatgcagctggatcacgcgacaggttggtgccgaggcattcgccattgcccttcgcccaattacaaccagcgtccggatggtgagatttcgctactggtgatccacaacatcagcttgccgccgggctgtttcggcaccggaaaggttcaggaattctttcagaacggcctcgcctgcgacgagcaccccttcttcgagcagatcgcgacgctgcaggtgtcggcgcattttctcatcgagcgtgatggggtgatcactcagttcgtctcctgtctggatcgcgcatggcatgcgggcgtttcgcgattcggtgagcgtgacagctgcaacgatttctccattggtatcgagctggaaggtaccgacgacgtgcccttcagcgatgcccaatacgacagcctgattcatctgtgccatctgctccagcaggcctatccggcaatcacaccggaacgggtctgcgggcacagcgatattgcgccggggcgcaagacagacccggggccggctttcgactggcagcgtttgcgcgcagccgccatcgccgcctgagaccgccctgacaggaacgatttcgtcatgatttttctcgtagtgctgctggtattgttgatcgacaagctcaccgactggcggcgtgacgtgcaacaggatggtccctggctgcaatggctgcggcgcgtcgagcagcgctcgggctcccgcattccctggttggggctggcgttagcggtgctcctgccactgctggtgctcggtctgctgctgctcgcgctcaagccgctggcctatggctggctcagcttgccgctgcatgtgctggtgctgctctacagcctgggccgcggccagggaaagcgcgagttcggtgcattccgtgacgcctggcgtcgcggcgacgaggaagcggccgcgctggtcgccgagcgtgacctgaagctcagcgccgccgacgcgccgagcttgctgcatgcagtcgaggcccaactgctctggcgcagccaccagggtttctttgcggtgattttctggtacgtactgctggggcccgtggccgcgctggcctaccgcctgcttgcgctgaccctcgaccatgctcgggaccaggccatgcgtgaacaggccgagcagttacgacacgccttcgactggctgccggtgcgggtgctgctggccagtttcggattggtcggcaatttcgtagcggtcaaccgtgcgctactcaatgatctgctgcattgggacatccccgcttcgcgtctgttggccgaggtcggcccggtcgccgctgatctgggcgagtctgtccaaggcgaggcggggatcgcccggctggacagcctggctgctctactggtgcgtacccgcatgctctggtacgccgccatcgccctctggatccttcttcgctagaggcctgcaccggtttccatgaaaccggccagtcgtgtctcgtcgaagcggctaccaggcgtcggataagttcgatggataggccggaatcggcgggacttctgccggttgtggagccatcatcctgccattaccttaagttacattagcggcgaccgatatcccgtataagttttcttgcgtcacgctccgacgagtccgcagcccctgaatgctgttgaccacacaacaagaaatagggagacgtcttttgaaaagcctgttgtatcccgcaatcgcattgatgaatcggctgagtttcggcatgaagttcagcctgatcagcgtgcttttcttcgttcccatgctgctgaccaatttctatctggtgcgcgactcgtatcgcgagttcgtcggcacccgcaccgaattgcagagccttgaactgctcggcacggcgctacagttgcgccgcgagatgcaggattggaaagacctgatcgagatcgaaggcatcatcggccagaccggtgaagtgcaggcgctggtatcccggctgtccgcggtcgaagccgcactgacggcacagatgcaacgcctggctccggttagcgacgatcccgaacaggtagccgagttcaccagccgccgagacgagctcgacgcggcgctgcgcgaggcgcaggcgcaacaatcgttgcaggccaaagccgccttggcccgggcgttgctgggcaaggggcaggtgatgatcaagctgatcgccagccagtcgggcctgagccaggacagccagcgggacgtacgcatgctcgcggagctgctgacctcggccacgcccacgattaccgcggcgctcggcgagggccgggcggttggctcctatacctttggtcagggctacctgaattccgatgccagcaacaagctggacaacctgttgctcgagctggagaagcagcaggctcagtacggcgcccagctgcacgacgtgctgggcagcagtgccgccgcccagcgccagctgcagacctataccgaagccagccacgcctctttgcagctcagcagcgatattttccaggatcaggtgatcatggccgaagcgctggatagcccctgggaccagttctacgacctgatcagcgccgagatggcgaagacctatgcgctcaatgacgcagtccttggctttctcgacgatcagctggcgctgcgtctggagcagaaacgcctgctcatgaccctgctgctggccgcattggctttggttttcctgctggtcgtctacctctacagcgcgttctatatgtccacccgtgcctcgctgcgcagcctcggtgccaccatggatcgggtggcggcgggcgacatgacggcgcgtttcaaggttcagagtcgcgacgagctgggtgagctggggcaggtcttcaacgagaccgtggcgaagattcgcgagctcatcgagcgtgtcggccagaccgtcggcgaagtagagcgtcaggcgacgcgcgtcgaaaccgtctccggcgagagtaaccagacggtttccgagcagcgcgggcagatcgagcaggtcgcgacggcaatgaacgaaatgtcggcgaccgctcaggaagtcgccaccagcgcggaggcggcggtcggcagcgcccagagcgtcaacgacgaaacggtcagcgggcgcagcctggtggaagcgcaggtcgccggcattgggcgtctggcggccgagatcgagcagtcggtcgaagtgatcaatcagctggccagcgacagcaaggccatcagccaggtgctggatgtgatcaagggcgtggccgagcagaccaacctgttggcgctcaacgcggcgatcgaggctgcgcgggccggcgagcaagggcgcggtttcgcggtggtcgccgatgaggtgcgtagcctggccaggcgtacccagcgatcgaccgaagaaatcgaacagatgatcggtcgcctgcagggcggggtcggcgctgcggtgaagaccatgcattcgagccattcgatggccgaggatacggtcagtcagtcggcgcaggtgcagcaggcgctcgagaacatccttggcgcggtgggcgtcatcgtcgaccagaaccagcaaatcgccgcggccgccgaagaacagaccgccgttgcccatgatatcgatcgcaatatcgtcgccatcaatgaagccgggcaacgcacagccgaaggcgccgggcataccgaacaggccagccgcgaactcagcgaactggtcgggcggctgcagcagctgatcggggcgttccgagtctaggcctcgcggctagcctgcaggccagccaaacagctcgcagctgttgcggtaactggcctcggccagctcttcggcgctgatgccacgcagcgcagccagctcccgacagatgtccgtcagaaactccgggctgttgcgctggccggcgtggctgtgcggggcgatgtccggggcgtcggtttccagcacgatgctctcgagcgggagctgcttgagcacacggtgcatgcggtgcgcctgtggccaggtgccggcgccgccgaggccgagcttgtaaccgagcctgatgtactcgcgggcctcttcccaactgccgctgaaggcgtgggcgatgcctgctcgcttgagcttgtgccgcttgagcgtggcgatcatctgggcgtgggcgcggcgcacatgtagcagcaccggcagctcgaattcgttggccaactccagctgcgcctcgagcaggatctgctggcgctccttggccgggtcttcgatgtagtagtccagtccgatctcgccgatggcgcagagcttgtccccgccgcgcaatcgcagcagccagtcacgcagcgcgtcgatgtgttccgcccggtggtcttgcagaaacaccgggtgcagccctagcgccgcatggacgcaaggttcgtcctgcgccagctgccagaccctggcccagttagcctgatgcacacccagtaccagaatgcgctcgacaccggccctctggctgcgcgccaatacctcgccgcgatcggtatcgaaggggtcgaagtcgaggtgggtgtgggtgtcgatcagacgcacgacagcgttctcctgtccgagggtgtgaagagggtgatgatggtcagtggctgggttcctcctcgatctggatttcgctgacacccagttctgccatgcggctgtgttcgctggggcgtaccggggtttcccagggcgcatcggtcgccgcacgtggctcgcggacatgatgcaggagaatctccagctcggcttgttccatgtccggctcctcgaaggaactgagcgtcagcgaggccggattaccgttgatcaggtagtggatgcggtagcgtttcagttcggtcatggcggctctcgactccaggtgtgtggaatatcggaccgccgaatcgccgtcaggctcccgagtccttgcgctccgattcgagcaatgccgccttgcgttcaatgccccagcgatagccggtgagcgactggttggccccgacgacacggtggcagggcaccagcaagccgactggattgctcgcgcaggcccgagcgacggcgcgcgcatggctgccgaggctctcggccagctcgccgtaacgtcgggtctcacctggcgggatagcctggagcgcctgccagacacgctgctggtaggcactgccacgcagatcgagcggcaatcgcgccgcccgagacggctcatccagctgcgccagaatcggctgcaaacactcgcccagcccgtgctggtcgcgggaaagctcggcagcggcgaaacgtgattgcagttcgccgagcagcgcctgttcatcgtccccgaacagcagcgcgcaaatccctcgctcgctggcggcgatcagcagcagtcccagcgggcatgggctgatcgcataacgcagcgactcaccggctcccttgcgtcgacgctgtgccgggctcagcgccgcggtgtcgaggtagacgccacgagtgctgccatagcccgcctccagggccgcgcccagcaccgaatcggcggcaggcagctgcgtctccagtcgctcgcgtcggcgcgcggccgcccaaactcgcggtgtgagcccggtgcggtgtttgaacgcgcgggccaggtgtgacgaggacaggccgatgcgcgcggccagctggtcgagggtcaagggctcggcgctttcatcgagcagacgacaggcagcgacgatcaaagcatccaattgctcggccgggctctgcccctgcggcgagcagcgtctgcagggtcgataaccggcggcttcggcttgcgccgcatcgctgaagaaactgacacggtcgcgccgcggccggcgcgccggacaactggggcggcagaagatccgggtcgagtggacggcgaatacaaagcgattgtcgtacgcttcgtctcggtcgcagagtgcttgccagcagtggtcgaaatcgagcatgtctgtgctccctgggtgcttggtttcgattgtccgtccagcccgtgtcggatgccaatccacaactcgcttttaaactgcgggcaagcatggaaggccgttgacgattgccgtaacctgcagttctgcctagccatgaagggtctgtaaaccgctgatgaaaacgccaaaacgactcgagccgttggtcgaggatggcctgatcgacgaagtgctgcgcccgctgatgagtggcaaggaagcagcggtttatgtggtgcgctgtggcgaggaactacgctgcgcgaaggtctacaaggaggccaacaaccgcagttttcgccaggcagtgaaataccaggaagggcgcaaggtgcgcagcagccgcgatgcgcgcgccatggccaagggttccaagcacgggcgcaaggaaaaggaagagaactggcagaacgctgaggtcgcggcactgtaccgcctggctcaggccggcgttcgggtgcccaaaccttacgattttctcgatggcgtgctgctgatggagatgatcagtggcgaggacggcgacgctgcgccgcggctcaacgacgtcgatcttcacccggacgacgcccgcgagttccacgccttcatgatcggcgaagtggccaagatgctctgcgccggcctggtccacggtgacctgtccgagttcaacgtgctgctcgacgagcacggtccggtgatcatcgatctgccgcaggcggtggatgccgccggcaataaccacgccttcgagatgctcgagcgcgacgtgggcaacatggcggcctacttcggccagttcgccccggaactcaaatacacccgctacgccaaggaaatgtgggcgttgtatgaggaaggcaagctgacgccggaaaccgagctgaccggcgagttcgccgagcccgaggatgccgccgacctcgatgcggtcatgcgcgaaatccgcgccaccctggccgagcaggcgcgcaaggaagcgctgcgcaacgccaccgacgaaccgagcgacgaaccgcccacgccgccgtggatgcgtcactgacatgctttcgggtgtctgaacagcgtagctttgctcctgagcggcctggcagtccgcattcgccgcgggtcgcgcctcctacaagggcagcggcgtgcacgactgcttatttgtaggagccccgccctcggggcgaattatttggcctttgcgtgcttgaaggtcgagtagcttcttggctactaagcggcctcgcaggtcatattcgccgcgggtcgcgcctcctgcaggagcgggaacgggtgcgcttttttgcgagctcaatagaaccccgtcccggagcgggagttcggcctatgctgagatgactggtgggtcagtgcccgctgccctgcgggcacgctgctcggtgacggcctgtcgggcgtcgaatgggcgtatcatggcgcggcgtttcacaggtcagtgcaggagaaggtcgcaatgcaaggtcagccacaggtcatcgaatatctcaaagaactgctgcgtggggagctggcggcgcgcgaccagtatttcctgcactcgcggatgtatgccgactggggcttcgagaagctctacgagcgtatcaaccatgaaatgcaggaagaaaccgagcatgccgatgcgttgctcaagcgcatcctgttcctcgaaggtacgcccgacatgaccccggatgcgatccatcccgggcacaacgtgccggatatgctgcgcagcgacctggcgctcgagtacaaggtgcgtgaagcgctggccaagggcatcgagctggccgagcagcacggcgactacccgacccgcgacatcctcgaactgcagctcatggataccgaagaagaccacgcctactggctggagcagcagttggggctgatcgaccggatcggcctgcagaactatctgcagtcccaggcaagctgatgctcatgaggccaggcgcaaggcctggcctcgtcgttgcggggcggtcagatacggaagcgactgaccatcgcctgcagctggctgcccaggcgcgccagttccacactcgacgcggcggtgtcatcgctggccgcggcggtctgctccgatacatcccgcacgtttattacgctccggctgatctcttcggcaaccgcgctttgctcttcggctgccgtagcgatctgctggttcatggcctggatgttggacaccgtgtgggtgatgcgcgccagtgaagcgcctgcccgacgcgtcagcgccacgctgctatcggtgaggttgcggctgttctgcatgatggccgatacctgctgagtgccgctttgcagcgcggtgaccagttgctcgatttcctcggtggatttctgcgtgcgctgggccaagccgcgcacttcatcggcgaccacggcgaagccacgcccggcttcacctgcgcgtgcggcctcgatggccgcgttcagcgccagcaggttggtctgctcggccacggcacggatcacgttcatgacgctgccgatcttgtcgctgtcactctgcagggctgtcatcgcttcggaggagcggatcacttcaccagccatgcgctcgatttgctcgatcacttcggcgacgacgcgatcacctgcatgcgcctcttcatccgcatcggtggcggcctgagcggcttgttcggcgttgcgtgccacttcctgcacggtggccgacatttcatgcatcgccgtcgcgacctgatcggtttcttccttctgactgttgaccgctgcgctggtctgcatggtcaccgccgagagctcttctgcggcgctgctgatctgactgacgccgtcacgaatgccgccgatcagttctcgcagtgtcgtgcccatctgctgtatgccgtgctgcagaatacccagctcgtcgcggcgggtgatctgggttgtcgccgtcaggtcgcccgcggcgatgcgttccacgtcccgcaaagtggttcgcagcggcaggatgatctggcgggtgatcagccaggccgcaaggatgccgagcagcagcgccagggccgtgctgacgaacatgccgctgcgcgcttcgacgctctcgatatcgaggcgatccagctggaactggtacagcgcatcgctgatgcgcacaatttccttctgctggtcggtcatttcctggcgggccttggcgatggctagggtcgccgcctccagggattcgatggcggtgcggtattcgccaagcacgtcgcgaacctggtcgacgacatcatcgctgttctgctcgatcatgccgcgatgctgttccagcgctgccaaggcgctatcgagctggctgtagacggcgccagcgctctgcgagttgggcgctgccaggtagatgcgcaacaggtattgcgcctgcttgatctcctcgcggacctgggtgatggcgacgagttgctcgaagcggcgttcgttctgctccgtgtgctgcaagacccgagcattgatggcgctcgtgagcgtatccaaacgagcggctgcggcatcgatgatgcgttgggactcgttggtgcgcgcatacccctggcgcatgtcgttcagcgagtgctggtattgctcgttgtagccggcctgctccttgagcatcctcacgttgaccgggttcttgaaggtgttgagcagcttggtctgctgagcgaggtagatctgcagattcttgtccaggcgctcggtggactcgacgtcgccgttggccagcatgaactgcaggcgcgcgatgcgcaggttcgtcagggtgttgttcagcagcgagatttcggtcatccagccgctgcgctgaatcacaccgcccaggctggcccagccgctccaggccaggatcagggtaagtgccagtacggcgccgaagcccagcgcgagcttacggctgacaccgatgtttccaaaccatctgttcattcagttaccaatagcaatggggtcaaaaacgttgccggctagatgcggcaaagcgctgctccgctgtcggcgggcaacgcgcagacttgagggttggccataaagatgacgccataaataaggcgtggggtgaggggctgcgacgcgggcagcggtgggcaggtcacacccgcccgcttagaacgaagcacgacggccgggtggccggcatggtcgcagtgactcgtgcggcattacgaggagcttcgtagcgctctgggttcgtaccggtcgtatcaaaagtattcgctcgttggccgattccgggacgagggtcgctgctcggccgcgcttagccggtatccctcattcaccgccggtggtgacatccggattccagatccttgaggatcggacaatccgggcggtcgtctccctggcagctatcgaccagattcttcagggtgtcacgcaggcccatcagctcggcgatcttgcggtccagggcttcgatatgtgcgccggccagggccttcacgtcggcgctggcgcgctggcggtcctgccagagcgtcagtagccggctcacttcctccagcgaaaagcccatgtcccgcgagcgtttgataaaggccaggcggtgcaggtcgtcctcgccgtagtggcgatagccgttggcgctgcgcccggcaggcgagatcaggtcaatggattcgtagtagcggatcatcttggccgaaagaccggatttctttgccgcctgtccgatgttcatgcgcgatcctccggtttccagcgcttgagcagcagggcattactgaccacgctgacgctggacatcgccatggccgcgccggccaccaccgggctgagaaagcccagcgcggccagcggaatgcccaccaggttgtagatgaaggcccagaacaggttctgctggatcttgcggtaggtgcgtcggctgatctccagcgccgccggcaccaggcgcgggtcgccgcgcatcagggtgattcccgccgcgtgcatggccacgtctgtgccgccgcccatggcgatgccgacgtcggcggcggccagcgccggggcgtcattgatgccgtcgcctaccatggcgaccacggcgccgccctgtttcagctcggcgacgaccgctgccttgtccgccggcagcacctcggcgtgcacgctgttgatgtgcagggcttcggcgaccacacgggcgctgccgcggttgtcgccggtgatcaggtgactgcggatgtgccgcgcgttgaggccggcgatggcttcggcggcgccgtccttgaggctgtcgccaaaggcgaacaggccgagcacgcgtgcctgcggcgtcgtttcaatcagccaggagagggtgcggccttcgccttcccaggcgcacgctttatcggccaggtctccggcggtcaggccttgctcgtcgagcagccgtcgattgcccagcgccagcgagcggccatcgaggtcgccggcaatgccgcggccggtcaacgactggctgcgcgccacatcgggtactgtcaggccgttttcttcgcagcgctccagcaccgctcgagccagcggatgctcgctgccgcgttgcagcgcgccggccgcacgcagcagcgctgcttcgtcgccatcgaccgcgtgcaagtggacgacgcgtggcttgccggaagtcagggtgccggtcttgtcgaaggccaccgcggtgaccgcatgtgccacttccagcgcctcggcgtccttgatcaggatgccgtgacgcgccgcgacgccggtgccggccatgatcgccgccggcgtggccaggccgagggcgcaggggcaggcgatgaccagcacggcgaccgcgttgatcagcgcgacttcaaccggcgcaccggcccaccaccagccggccagggtcaacagggcgatgaccagcaccgccgggacaaagacctggctgaccttgtccaccagtttctggatcggggccttggccgcctgggcgtcttcgaccagacggatgatgcgcgccaatacggtttcgccgcccagcgcggtggtgcgcaccagtagtcggccttcgccgttgatcgcgccgccggtaatgcgatcgccgggcgccttggccaccggcaggctttcaccgctgatcagcgcttcgtcggcctggctttcgccctcgacgacttcgccgtccaccggaaaacgctcgccgggcttgaccagcaccaggtcgtccagccgcagcgcggcgatggcgacctcctcttcatggtcgtcgaccacacgcaccgcgcgatcgggccggagtgcttcgagcgcgcggatcgcagcgctggtctggcgcttggcgcggctctccagatatttgcccagcaacaccagcgcgataaccaccgcagacgcctcgaagtacaggtgcggcatggcgccggccggcgcggcccaccactggtagaggctcaggccatagccggcgctggtgccgatcgccaccagcagatccatgttgccggcgccggcacgcacggctttccagcccgctacgtaaaaacgcgcgccgagaacgaactgcaccggcgtggcgagcaggaactgcgcccacggcggcaacatccagtgcaggcccagcaggtcgccgaacatcgggattaccagtggtgcggccaacagcagcgcggcaatcaaggccaggcgctcacggcgcaggcgccgctcgctgttgtcggtcgccggctgctgatcgccgatggtctgcgcatggtagccagcggcctcgaccgcctggatcagcagcgacggatcgacggcgccgagcacctcgatgcgggcgcgctcgttggccaggttcaccgcggcgctgcgcacgccgggcactttgagcagggcgcgctcgacgcggccgacgcagctggcgcaggtcatgccctcgatggccagctccaggctctgtaccggcacgccgtaaccggctttctccaccgcagccaccagtccggtcaggtcggcatcatgagcctcgacccgcacctgttcggcggcgaggttcaccgcggcggtgtcgacgcccggcaccttcagcaaggcgcgctcgacccggccggcgcagctggcgcaggtcattccggtaatcggcagggtgtaggtggcagtggacatgtggattctccagatcagcctttggcaagcatggtcaacctttaccttatggcaaggtcaagtccagctgcggattgccgcaggcgaccgcttgaccttgctgcgtggcaagctcaaggatggcgcctacccaagctcagaggagaaaccgcatgcaaacgtttcaggtgaaaggcatgacctgcgcccattgtgagcgcgccgtaacccaggcgatccaggcgcgtgatggagatgccaaggttgaagtggatctgggagcaggcgtggtgcgggtcgatggccgcctcgatgaggcgacgattcgcgaggcgatcgaagaggaagggtacgaggtgcaataagcgccaggcgacagcctttgccgtcgcctgcccggcttattgaaaggcggcgctgtcccagttcttgaccaggccgcggaatagcggatcgatcagggcggcgctgtcctgttccggatcgaacagggtcgaatcacgcgtccagtcactgaacagaccaacgatcagcgcgtgcagggtgcgcgccgccagcctcggcgtaacgcccgggtagaggctgtccgccgcgctttgcagcatcttttcgcacaactcgatgaacaggttgatgaatgcgtgatggcgctcttcggcttcgcgcagttcttcggtgaattcgcagcgatgcagaaggatggtcatcacgcggcgcttctgctcgtcccggccgagtgcgctgataccgtcaaggcagagctcacgcagcgccctcagcggttgttgctgggtgcagctgcacagccgctcggccatctgttccggcggcaggcgcacctggttgagcatttcatggaacaggtgagccttgttctggaaatgccagtacaccgcgccccgcgtcacgccagcatcacgggcgatctggtcgaggctggtgtgcgccacgcccttgtcgagaaacagtcgctcggcggaggcgagcagggcgattcgggtcttttcggcgtcttctttggttcttcgcatggtcggctacggcagctctaggctgatcaaatggccccgtaagggcgggcagcgcggagttcatccttcaacttctgcaactttgcttgtttacaatcgtctgtgtatgtaacagcatctcagcttctctgtaaacgatcgagcgccgccgtggtcagccagcgggcggcgttcgtgttttttgcgcttcacgagttcagtccatgccgcttcctgttctattgattctgggcgcgctcagcgccttcggcccgcttgctatcgacttttatctgcctgccttcccgacgatggcgcgtgcttttgccacggatgtcgaacatgtgcaactgtcactggccgcctatttcgtcggccttgcgctcggtcaactgatctacgggccggtggcggatcgctacggccgccgcaagccgttgctggtgggcgtcacgctgttcaccctggcgtcgctggcctgtgccttcgctccttcgctggaatggctgatcgcggcacgcttcgttcaggcgctgggtggttgtgcggggatggtggtgactcgggcgctggtacgtgacagctgcgatccggtacagggcgccaaggtgttttcccagctgatgctggtaatgggcgtggcgccaattctcgcgcctcttgccggtgggctgttgctcaacagtttcggctggcaggcgatcttcgtgtcgctgacgctgttcagcgcgctctgtggcattgcggttgcgctgcgcttgccagaaacgctagcgcccgacgcgcctcgcccaccgttgcgcggcaccttcggacgctatgtcgcgctgcttcgtgataccgagttcgtcgctttcgccctggccggcggcgtggccatggctgggatgttcggctacatcgccggctcgccgttcgtcttcatcgagctctacggtgtgcccgccgaccagtatggctggttgttcggcagcaacgccgcgggctttatcatcgtttcgcagatcaacgcgcgattgctgcgcctgcgcggtccggggttctggctgcggcgattcgtctggttctatttcgcctgcgccgcgatcttgctgatgcttgcactgagcaagccggccatgctctggccgttgctgattccgctgttcgccgggctcgccagccttggcagcattctgcccaacgccaccgcctgcgccatggccaagcagggcagtcaggcggggctggcttcggcgttgatgggcagcctgcaattctgcgtcgcggcgttcgcttcggcgtcggtagggtggctgcacaacggcacggctgtgcccatggcgttggtcatcgccagttgtgcactgctggcggcgtgcctggcctggtacaccggccagttcgatatcgcgcaacggcgcaaggccgcctcgtcctgaggcggcctcgggcgtgctcagaacccttcgagaacgatcttgcccttggctttgccgctttcgatgaaggcatgggcgcggcgcaggttcacggcgttgatggttccgtagtgctcgccaagcgtcgtcttcagcacgccgctgtcgatcagctcggcgactcggttgagcagcctgtgctgctcgatcatgtccggcgtctggtacatcgagcgggtgtacatgaactcccagtgcagcgacaggctcttgcgcttgagcaggctgatgtccaggctcgccgggtcgtcgatcagcgccaggcggccctgtggctgcagcgcttcaacgatctgcggcagatgcgcgtcggtgtgggtcaggctcgcaacgtgggtcacgtcagcgatgcccaggcgttgcagctcggcggccagcggctggctgtgatcgattacctcatgagcgcccagttcgcgtacccaggcctgggtatcgctgcgcgaagcggtgccgatgacgttgagcccggtcagttgccgcgccagttgcgtcaggatcgaaccgaccccacccgctgcgccgacgatgagcaggcgctgatcgcggtcttcccgcccctcgctgatctgcaagcgttcgaagagtaattcccaggcggtgatcgaggtcagcggcaaggctgccgcatcggcgaaaccaagggaggctggcttgcgcccaacgatgcgttcgtccaccacgtgcagttcgctgttggcacccgggcgatccagtgcgccggcatagaacacctcatcgccgggcttgaacaggccgacttcactgccgaccgagcgcaccacaccggccacgtcccagcctagcacctggtactggccatcttccggctgcatgcgcaggcgaatcttggtgtcgaccgggttcaccgagatggcgcggacctcaaccagcaggtcgcgcgggccgggtgtagggtcgggcagttcgatgtcgagcagtgaacgcggatcgtcgatagtcagggattgttggtagccgatggctttcatgaggttctccatgctgggtcagtgggttgggccatgttcggctttcgtgccacgaagaaaaacagcatattgcgcagaggctctttcaacggattattgaaaatgctgcgcaccgatgacttgcaggtgttcgttctgaccgcggagctgggcagcttgtccgctgcggcccggcgattggagttgtcgcccgccgtggcaagcgctgcgctcaaacggctggaagcggagctgggttgccggctactggtgcgttcgactcgcagcctgcggctgacgggcgagggtgagcagtatctgccgcacgcgcgctcggccctgcagagcctgctcgatggccagcaattgctcgccggtggcaaggcgacgatcagtggcccgctacagctgtcggcgccctctgacttcggccgcaacgtgttgctgccgtggctggacgcgttccagcagcaacatccattgttgagcctgcgattgttgttggccgaccgcaatgccgacctgttccggcagccggtggacatcgccttgcgctacggccagccggaagattccagcctggtggcgctgccagtggcaccgggcaatcggcgggtgctctgcgcgtcgcctgattacctggccgtgtatggtgcgccgcgcagccttgccgaacttgccgagcacaactgcctgcgcttcatgctggccgggcgagtgcatgagcgttggtgttttcacgaggggcgtcgcgaactggcgcaactggtgagcggtgatcgcgtcagcgacgatgccgacgtggtgcgccgctgggcattggccgggcgaggagtggtgtacaaatcctggttggatgtcgcccaggatgtgcaggcggggcgcctggtggtgctgttgccggcgctcaccggcgaggcggcgccgctgaatctgatctgcgcgcaccgcgctcagctgggtgaaacgctgcgcctgctgcgcgagcacctggtcgagcgctgtcgggagctgctcgaccaggcgccgtttgccggctgagaggacgggccgcgccggacggcccgcccgccgtcatctggccaggcgcgcgtcgaggctgttctgcgccaggcgtcgcgcctgatcctcgctcatgcccaggctctcatgcagggccatgaagttctccgtcacgtagccgccgaagtaggccggatcatccgagttcaccgtgaccttcacgccctgttccagcatttgcaggatgttgtgctggctcatgtcctcgaacacgcagagtttggtgttcgacagcgggcacacggtgaggggaatctgctcgtcgatcaggcgctggatcagcttggggtcttcggcggcgcgcacaccgtggtcgatgcggctgaccttgagcaggtccagcgcttcccagatgtattcgggcggaccttcctcgccggcatgggcaacggcgaggaagccctcggcacgggccttggcgaagacgcgttcgaacttgctcggcggatgacccatttccgagctgtccagaccgaccgcgaagaaggcgtcgcggaacggcatcgcctgttccagcgtcttgaaagcggcttcttcgggcaggtgccgtaggaagctcaggatcagtccgctgctgatgccgagcagctcgcgaccgtcagccagcgcaccgctgatgccgcgcatggctacctcgaacggaatgccgcgatcggtatgggtctgcggatcgtagaagggttcggtatgtaccacgttctgttcttcgcacttctgcaggtaagcccaggtcagatcgtagaaatcctgctcggtgcgcagcacgtcggcgccggcatagtagaggtcgagaaactcctgcaggttgccgaaattgtaggcgctgcgcagcgcatcgacgtcgttccagggcagggcgatcttgttgcgttcggccaggcgaaacagcagctcgggctccacagaaccttcgaggtgcaggtgcagttcggctttgggcagtgcgttgagccagtcgtacataggagtgatcccgtccggagaaagcgtcattctaaccagctgaccgcattgaccccagggtcaattttgcggcgggtatgatgggcggctgctgggccgtagcacgggcagatgaacaggatgtgaccagtcgatggaaggcaccgtgccgcctgcggcgcagccgtctttgcagagcctatcaacagagttttccacaggaaatgggcataatcccgtggcgcagggtggctttttgccgttattccgaagcatcgcgggtagacggaaaaaatcgccattaaaacaagcggttgcggcgtaaacgaaacgaaaggacgcgagttggctaaataatggccaatctcggcgaagccttggagcgtctggcttgccgcggctcatccagaggttatccacaattgcgcgcacagtaatggtggacaaccgacgtataaaaaaaggccatgcacgactcgtgtcgacatggcccttggtgcgtcgcgtagacgtaccggtgtggctgtcagttctgaggggcggtgcccggagctggctcacgtggttcgaccggctcgcctacgtccggctcgtcatcttccggcatggtcacatcgacgtccggtacggtgactgtcttctccttggtaccgacgtcgacatcaggcgcgtcgacatcgtacttgggcatcttgccgccatcgacttcaacgtcaggcatcttgccttcttcggtcttttccacatcgcacccggcaaggcccagggacgctaccagcagcgctccggggatgagccatttgtaattgctcttcatagattgtctcctctatcgcaacggaatgcgccgagacgccttccagggattcggcgggacatgcgcagttcagacggctgacccaacggcaaacgccgttgtaatagggacttcgagcgggcggtgcagttcagctcgacgacattcaggccccggcgggtcgcaattcgattcgcccgcggctgattccggcgagggtgtgctgtagcgccgcatgccgttcggcaggcacggccaggaccagcgccacgccttgcgcgtcgaatgtttccgcctcgatgaaggcgtcatgctcgcccagccgtgccttgatcagcgccagctcggcgaagcggcaatggcagcggcaacgcatccgggcgatcagctccagccgctctccgccctgcaggcatttggctgtagtgccgccataggcgcgcgccagcccacctgtccccagctggatgccgccgaaccagcgagtcaccaccacgactacctgatcgcagtcttgccccccgatcgccgtgagcatagggcgaccggccgtgccgccgggttcgccgtcgtcgctgaagcggtactgctgaccgaccttccaagcccagcagttatgcgtggcggtgctgtcgctgactgcctggatgaacgcctgggcctcgtccggtgtggtgatcggggcggccttggcgatgaagcggctcttgcggatcacttcttggtagtcgcaaggggtggcgagggtaaaaggcatgggcgcgacagcagcaaaagcgtgattgtaacgggtcgaccgccgctgtgtgccattcgtgccgtccagccagtggggtgaacttccactgatgacgcgacacacaactaggtgcgctctgaccgcttgttccagattaggcacgtgtgtttcgcggtccgggtgtgtgcgtcaggccctgttcgttcgggcaagtggccggccagctactgacaagtcggccgcggatggtcggcgttacgcataccgttagcggaaagatgggatacctggggcgttcagagcctgcgatagccaccaattccgggaggaacattcatgctcaactctacctaccaatcctgcatccaggcctgcaccgattgcgccgtcgcctgcgaaacctgcgccgcgtcctgcttgcgcgaggacgacgtaaagatgatggcgcgctgcatccaactggaccgcgattgcgccgatctctgtgccctggctgcggtgctgatgacacgcgatagcggcttggccaaagaaatgtgccgcatctgcgcacaagcctgccgtgagtgcggcgaggagtgcggcaaacaccagatggatcactgccaggcctgcgccgaggcgtgccgcaggtgcgccgaagcgtgcgagaaaatggcggcctgatcgcacgatcgcggcgacccaagggccggccacttattggtgccagccttttgtgtcaggccagccagtccagcgtgaggatcagtctccgttcgccaggctcaacctgcggcgaacggtggatgattccggccccttcgttaccctgccatttctcgcccttgaacaaggcgacctcgcccgcgtgcaggcggccgatttctctcacatcggttggttcggcggccggttcgcccaggcgctggcgaggcatggcgtcttcgctgagccactcgcttccggcgcccgcgtaggtggtgatcagccgcagcggcaagtggtccacgtgaaaacgcgggcacatcgccttgtccagcacgcgcaggcgcagcccgacgcggcgtgcctctatcaagcaggcaaatgcgctcaccagccaggcgacgtcggcgacaaacccggcgtgcccggcgatgtcccgataggcctccgccaggggcggcgtccgcaggtcgtcggcatcgggttcgagtgtcagcgattcggccagcggctcgccgagcgccaacagcgcgcaagcaaagtcggtgacaggctgcggcaatgaacgccgccacaccgcgaggttgacgccgtcgtgcagcgcgtcgcccagtactgcaggcgcgtcgccgaatagttgctgtgggtacggccgaacgagtgggcgcgccagcatcacgctactgcctgctgccaggggccgaacgggtcgggcatgcgcaaccagtgctccgggccgaggttccattcgaggtcgctgagcaagcatgcatcgagctccgtgcgcagccgatcgaagtcgatgcgctggccgataaagaccagttcctggcggcagtccccgcagtcgtcgtcccacttcaggcggatggcggcacgcgagtcatcatcggcgggccactgcgcgtccggcgtgaaacgccaccagcgaccggcatattcgtagcgcatcagtccgccggcctgagaccaggcaccggcctcctgcgggcggctggccagccagaagtaacccttggagcgcagcagacggccattggtccattcgcgattgagaaagtcatggaaccgttgcgggtggaaggggcggcgggccagatacgccgtggacgcgatgccatattcctcggtttccggcacatgctcgccgcgcatttccttgagccagcccggcgcctgggcggcacgctcgaagtcgaaacggccggtgtcgagaatcttcgccagcggcacgcgacccatgcttatcggcagaatttcggcctgggtattcaagcggcccaggatggcggtgagctcttcgcgttccacgctggaaatcagatcgatcttgctgatgaggatgacgtcggcgaattcgatctgctcgatcagcaggtcggtgatcgagcgctcatcctcttcaccgagggtttcgccgcggctcgccaggctctctgcggcgtgaaaatcctgcagaaaattcacgccgtcgaccaccgtcaccatggtgtccagccgcgccagatccgccaggctctggccctggtcgtcgcggaaggtgaaggtttcggcgaccggcaagggttcggagatgccggtggattcgatcaacagatagtcgaagcggccttcgcgggccaacttgccgacctcctcgagcaggtcttcgcgcaaggtgcagcagatgcagccattgctcatctcaaccagcttttcttcggcgcggttgaggctgacgtcgcgctggacctcgccgccgtcgatgttgatttcgctcatgtcattgacgatgaccgccacccggcggccttcgcgatttttcaggatgtggttgagcagggtgctcttgccggcaccgagaaagccggaaagcacggttacggggagacggttcatggcggtttctcaggcggttcgttggtgtttttcgcgctgttcctgacgctctttggcttcgatgcacagcgtggtggtggggcgtagcagcagtcgtttcagccgatgggctcgccggtctcggcgcaccagccgtcttcgccgcgggcgaggctgtcgagcgaatcgtcaatcttgtcgagcagcttcttctcccgttccagcaaccgcagctgccagtgacgctgctcttcggccgtgccgatatcggacgggtcgctgctgggctcctgctcacgcagcgcctggaattcctcggcgatacgcgcctgcagttcggcgcgctggcctagcagtaaggtgcggaaaaaagcttgctgggcctcgttcatgtaggcgtcagcgggctgggcaaggagttcggcttcggtcatgggcagcacgtgtgggctttaatcatagggttataacataacaaaaattatctaatagtgtcagtgctgattctggcaacggcgacggttgggctacctcgaaatccgagcgagccgtcgtgagggcaacgcttcagggccggacgtttgcgcccatcgcattcgaagcaaaaaggattttgtcgggccagaacccacctatgattgtttgtcacccctcagcgagggctgtaacggcttatgcggaggccgccggagatacgccatgaacttgacgacactgctgctttttttgcctgcatgcttcgcgctgaacatggcgcccgggccgaacaatctgctttcgatggctaatgcgaagcgctacggcgtacgtgtggcctgctacgcgggtatcggtcggctcattgcattcgccggcatgatcagcctcgcggcgacagggcttgcatcgattctttatgcgtccgaaaagttgttctttgcgatcaagctggtcggcggcctttatctgctctggctggcgtatcagctatggcacgccgacccttcggatggcgacagtggcccggtggcgcgcaagagtctcttggggcttgcaaagcaggagttcctgctggcggccggcaaccccaaggccatattgatcttcacggcgttcctgcctcagttcgtcgatccttcgggtgacatgggctttcagttcctcgtgctcggcgtttgctttctgatcctcgagtgggtggccatcgccggctatgcgtatttcggtagcgcgctgagacattggttttcccgcccttcgatgcggcgggtgttcaaccggacgtgtgcgggcctgctcgccagtgcaggggttggactgctgttcgcgcgtaaggactgatgtcgtatgcaatgagggtgacttgtcggcagagcgagcggcagtggtgtgctacgtgatcgggttggacggacagcctgagcacaccgccgctcacagaggtcacgccatctgccgctgccgataggcctcgccgatctgcacccccggtttgtggaatacgcggattcggcaagcggacggttcggcttcgatcgtgccttgggcttagttgctcttcgcccgcaagcgatactgccctggcgtcatgccgaccacggtcttgaagtcgtggataaagtgcgcctggtcgctgtagccgcagaccagggcggtgtcgagcagcggctggccggtgcgtagttggttgcgcaccagcgctacacgctggatgcggctgaactgcttgggtgtcattcccacctgatggcggaacaggcgctcgagctggcgctggccgagtggcacgctctggagcagatcggccaggcgcgaacggcccccgttggcggcgatctgcgctaacagctgttgcaccgggtcgcgacgtgcctgggtttctttcaggcgactgagcaactcgcgctcgaccacggcctgttgcgcgctgcggtccagctcggccaactgatccacgagatgcgcgagtccaagccggggccagtcggcgtcgtggaatccggccagctcgtcgagaccgacgccgaacaccgcagcgcccatgccgggatggaagcgcacgcccatcatgctgacctggccggccagttgcaggcgtgtactggccagctgcggcccggcgatcagcgctcgcggcccgcgcggggtgccatcgaaattcagcgggtcggcaaagttgaagatgacgccactgccgccgtccgggtgcagcatctgctcgtcgtaggtctgtaaaccgtcgccctccatccaccagaaacgctgcacgtacgccgccagcgccgggctcggcgggcgggttgtgaagccctgcaggcagggcaagcggtcgtgaagggactcggtcatgatgggccgcttggaagatgtcgaaaatctacaatagcgcagcatggcggctgcgtagccttggttgcacattcaaaccgaggagtgaccaccatgcgcatgaactaccaggccgctgcacccgatgtgatgaccgcgatgatcgggctggaaacctacctggcgcggcagagccgccgcgaggatggcgtcgacaaaccattgatggagctggtgaaaattcgcgtctcgcagatcaaccagtgcgcctactgcctcgacatgcacaccaaggatgcccgcgccctgggcgaaaccgagcagcgcatctatgcactgagcgcgtggcgcgaaacgccgttcttcaccgaccgcgaacgcgccgcgctggcctgggccgaggccaatacgctgctgccccagggcgtttcgcagcagctgttcgaggaggtgcgtaagcatttttccgaggcccagctgaccaacctgaccctggccatcgccaccattaacgcctggaaccgcttcggcgtttcgttcgcgcccgtgccgggcagctaccagccggggtagggcggatgcctgccgccgctcggctggaaggtcgggcggctcatcgctttatctcctgattgcccatggcgcagaagctctgtgcttgtttgcccgcggtcaagctgcgcagttgcgtcatgcactgcgcctgggtcggggtgcgagtcacgctgagggcgtcgtcgttcacgctgatcaggtagggctggttgtagcgcaggcggtcatgccagctgctgaagtccagatcgctgtagacgcactggtaacgcatatgcccggagaatcccttgaagcgatcactgcggaaaaagtgccggtagcgtggccagtcacgcgcgcgctgcccctcgcgcacggcttcgcggcaaccttccagctcggtgatctgcggctcgtggagaaagatggtctgcgccaggctggaaccgtccagctgaactgtcgccaccagatagacctgccgctcggccgcctgcgtcgccagcgccatcaggcaacccgccatccacatccctgatctgatcacgctgccatgctcctgaagggccgttccgtcgagggcggcaccctagcggaggacagggcgggagacaagcgtggagctgcgccgtagggagcgcggatcgcaggccgtcgtgtcgagcgcagatttccgccccaggcggcgactggcgaaagtgacgtgttcggcgacgcccaaggggaaatgaaatgttgcaagcccggcgcagcatgcgactgatgggcgacggctttgctgtaaattaggctgccattggctacgaatccccctacatgaccctcctgatagcgttcgctgtcttatccatcctcgtttcattcatctgttcgatcctcgaagccgcactgctctcgctgacgccgagctttatcgcgcaccagaaaacctcccggcctaagctctacgagcggctgaaacgtctgaaggacaaggtcgaccagccgctcgcggcgatcctgacgctcaacaccgtcgcccacacggtcggcgccaccggcgtcggtgcgcaggtcaccgtggtgttcggtaacggctatgtcggcatcgcctcggcggtgatgacggtgctgatcctggtgctgtcggaaatcctgcccaagaccatcggcgcgcgttactggcgcacgctggcgccgttcctgcctccactgctgaacggcatgatcctgctgctgaagccgttcatctacctgtccgacatcatcatgcggcttatcggcggcaaggagccggagcatgacatccgccaggagatcaaggcgctgaccgtgcttggccgcgagaacaagagcctcgacgaggacgagcagcgagtcatccgcaacatcctcgacctgcatgagatcaaggtgcgcgacgtgatgacgccacgtacggtctgcgatcacacctcgccggacaccagcatcggcgcgttcaaggcgcaggtcgccgacagccagttctcacgctacccggtgatcggcgacaacgagagcccgctgggcgtcgtgttccgctatgacgcgctgtcagccaccgatgacgaagcgccagtgtcgaccatcatgaagccgctgcgggtggccccggagatgaccagcgtcgagagcctgatgacccagctgctgcacgagcgccagcacatgtgcctggtctatgacgagttcggcagctggcgcggtctggtgacactggaagacatcatggaaaccatcatcggccaaccgatcatggacgaaaccgacgacatccccaacatgcgccgctttgccaagcgtcgctgggatcatcgcatcaagcgcgttcgcgagagctgagatcagccagcggagcgggattgccgctccgctggctgatctcagcgtttgacggtacccagccgcatgaagcgcgtttcaccgctggcgtcttccacgccgtcgttgtcggtgacgacgaacaagcggcccagcttgtcgaccgcagccccttcgaccttgtccagcacccagccgccggtgctcttcagctcgggcagaagatcacgctccaggcgcttgctcaccagcgggaaggcctgaccttcggcgacaggctgcatgccgctcaggtcgatgcgatacaggcgtttgacctcggcggcagggccttgctggttgtcgcgctcgatgaccaggaactggccattgccgatcgaggtgagttcggacaacccgacccaggcgccctcaggcgcggcgtcgagcgggtagtggacgaagccccactcgccgctggacgggttgaacacgccgatgggtaccttgccagccgggtcgttcttccattcgcgctggaacgcgacatacacgcgggtgctggtgccttcgccgaccaccgatacgccctcgaagccgttgctggtctgctgcgccgcgacgtctttcggcaacgcgtattcggccagcacctcgccgttcgcgctggcgcgaatcagcaggttcggcctggccttgccgttgccttccgacgcgagccagaagtcgccattcccggcctgggcaatgccctccaggtcgtagtcgacggtcttgccggccttgcgcagttcgatctgcccgtcgatgacggcgggcgtcttgctcgtgtcgatattgaaaatgcgcgaggccttgtagtagctgtccggaacggcgtaaagacggtccgcttgcgcgcggtccgccaccaggccgctgagcgcgccccaagggatcaggtcgcggtcagtggagcggatttccggatagttcgccttgctggcgccgtactggtagatcgacagggtcgaacggtagccgtcctcggccgaatcctcctcgctgctcactaccagcaggttgcgcgacgggatcggcaggatgccttcggggcccatgccggttggcaacaactggtgcatcactggagcccaggggcgcgcgacgtcgtagaccgcgaccgcattgccgcgctcgctgccgacgaagaggaaatcctgttggcggaagctcgccgaggcgataccctccggctcgatgcccttgttctccgagcggctctcggggtagtggccggcgcgaatgaaggcgtgctccagcgacacgccggcgtcatgccagacctggccggtgtagtcgaacagggtaaagccgcggctgccgccggtttcgccatcggcatcctcgtagtcgccttcgttggcggtcgccaccagcggaccgacccaggcgatggcatccggttcgcgacgcttgcccttgagcacgccgacgggctggatgcggtcgttctcctccacgtccacaccttccagatcgacctggccggcgctgaagtgacgcagtacgcggccgcgacgcaggtcgaccagcaccacgtggttgttctcctgcagcgtgacggctgcgatgtcgtggtcgttgatgctgacgtattcgggctccggatcgttcggcgcgatgtccgccaggccggtcagatctacgtcccgcgtctgccagcgtgacggctggcccttgaggtcgacgatgcgtagatagccggccggcagttgtggcagcagcccgtcgttaaggtcctcgtcccgttcgttctcgatcgccacggcggcatagcggccccgcggactgatggcgatggaatccggctgaccccccatgggtagcgtcgcgacacgtttgggctgcgtggggttgcggatgtcgaacaccgccagcacgccgtccggctgggcaaagctgagcgaggtattcaccgccaccagtacgtaatgctggtgcaccgcaaccgacgtcggttcgccttcgagctggacgaagcccgccggttgcgggtttttcggatcgcggatgtccaccaggccgatgcgctcgcccgggctgtcggtatagatcagcgtgcgaccgtcgcgactgacggcggtgatctcggcgaccgtctgcttggatgcgtcctcatcagcgccgaggttgcggtacaccgggaaggtcgcgacccgctctaaatatgccgcagcgcgcgagggtgcggcctgcgaggtcagtggcagcagggccagtgtcagcgcagtggacagcgcggtgcgggtcaggcgggtcggcgtgatcatgggggcctcggcgttcggtttgttttgagtcaaaccacgctaggccggttttcttacagaacgatgtccgagggtgacgtcgtggtcgttgcgctggcacgaccggtcagggcaccgatcaggctggcgacgaggcgcccgtccagcgagcgccaccctggggctcggcgctcgctggacctgtgttgcgtctagttgctcaagggaggcgttcgcggcggaacgacgcgcctcgagccggtcgattcgtatgccgaggccagccgcagcaaattcgaatcgtcgtaggccctgccggcaaaggtgaggcccacgggcatgccgatgtccgacatcaggcccatcggaaccgtgaccgtcggcaccccgaggtggcggatcgcgagattgccgttggcgacccacacgccattgcgccaggcgatgtccgccgaagcggggttgacgtccgcatccgcagggcccacatcggcgaccgtcgggaagaccacggcgtccaacccgtgctgggccatccagtcttcgagatccagcttgcgggtctgctccaagccacgcagcccttgctcgaggctggcaatctcgtcccacggcgtgatgccgcgttcggccatgcgcacgtattcggccatgctggcggcgaggtcgccttcgcggttcggcagcgtgccgggttcatgcggaaagatcagcggcccgtcgacatccgcgagccggttgagcttcggatcgttgttggtccgtaagaaatggtcgaaggcccatgccgagaggtcccacagctcgtcgtggaggaactgctccgaaaccaggccgcggttgtatacggtgggcgcgcccgggcggtccccttcgcagttcgacaccagcggaaaatcgacttcgaccaccgttgcgccagcggcctccagcgcacgacgcgcctcttcccaacgctcgatcaccgattcgcgcgtcatgatccgctgcccggtggggccgccgatgccggggttttcgctggtacccgcttcgggatccttgttgatgaacatgcgcggtacgccgaagcgtttgcctgccagcgaggcggcgtcggccaacagttcgcggtaggaggcggggcgaatcgacgaggcggcggggatcggtacccagggctgcatgcgccacaggtcgccggcgacttccgggtcgtcggcgacgacgacgtcgagcacttccagcagatcggccatggttcgtgcatagggcacgactacgtccatggtgggggtgagcggccaattaccccgcacggaaatgacgccgcgtgacggcgtataggcgcacaggccattgttcgacgccggcccgcggccgctcgaccaggtttcctcggcgaggccgaaggccgcatagctcgccgcggtcgcggtgccggcgccgttcgaggagcccgaggcgaagggcgcggtcaggtactccgcgttgtaagggctctcggcgcgcccgtaaacgccgcgctgcatgccgccattggccatcggtggcatgttggtcttgcccaggcagatggccccggcggcacgcaggcgctcgatggtgaacgcgtcgtgataggcgatcaggtctttgaaggccgggcttcccgaggccgcggtcagccctttgaccaggtaactgtcttttgccgtgtaggggatgccatccagcggacccaggctcgttccgctggcgcggcgtcgatcggaagcctcggcctccgccagcgcatcgggattcggtacgaccagcgcattgagtgcggtggccgtatcggggccatcgtaggccttgaccctggccagataggcttgcaccagctgtgtcgcggtcgtctgaccggtttcgagcgcgtttctcagctcggcgatcgagcattcggttacttctatcatgatgatttgccgttgcgagtccgcagggtcgttacctgcgcaggtgagcggtgatgtggttgcctggtcatccttgccgtgccgcctggtgttcctgtgccgattatggcgcagccactatggctatcaggatagccgaacgggggctgcggtttgccgcaacagccgccggtgccgattgacgcagcgttgccttcgccgaccccacgagccagcggtatgctgcctttcagaccgggcgggctcaaggccgtcgaggcgattcccggccttggcttcggtggaacacagcggagcatagattgccgactacgggcgctgaatcggcatcggcgaaaacgcgccttgtatcgatgcaatcggcggacgtggcgtacaaggaggcgcctgttcgcgaattccgctgtcattcggcccactcaggatcgccggtgaacacgacggtcagccaacggtgcggcccctctccgccgatcgcgtcgccaagctcctcgcgcaaggcgtcccactcgccgatcgttttggttccggcggattccggcacgatgaagtagagctcgatttcgcgcgaacgaccgaccttggcgacataggcccggaaggattggagcccatgcttcccgacgaaggcctgcgccacgctatcgatgtgtcgcttgaagtccgccggcgttaccagaaagatgtccgccatggcctgacgtaccgccggcatcggcatcgggatgatgaccagacacaccagcgccagcacggccgggtcgatataaggcgaaatccacgcccaagcggtgccttgaaccagataaccgatgcagaaggcgatcagcagtgccgtcgtgatactggcggacatcacccagccgttgacgtccatgcgcaggaagtcggagccgatcttgcgattggcgcgggcctctgccaccgcaattgtcacgcagacggcaaccgtcagcaccgcataaatcatcgccacatcgaacgccagctcccggccgccagcgagcaagctgctgaccgcgttgattagcgcatagatcgccactcccgacagcagtatgccgttgagggcaagcaccatgggctccagatgccagaaacccatggtgaagcgatcgcgcatgttgcgcgacacctgcgaagcgcttgcgtaggcggtgatcaacctcaccaccatcagcgacagtccgctcatgctggcatcgacgagcgaatacacaccatcgaaggcgatcgaaaacgagccggatgccagcccgaagccgattccgatcgcggcaatgaacagagtggcgacgatggacgtgcgcagcacgccctgttcgttcgagagattgaagaaggtacgaagtgtttcccttcccatggttgagtctccaggtcgccggtgggccgcaagtgctgccgaacggtagtgatgggcacaatcaggccccgctcgctgacctagacgacgagccgaggctcgaagccgaatcagaagggggtgccgaagggccagttgaaacgatgtcgggatgcgctcgcgcgtgtcgtcgagtcgcatgcgggcgaacggttgccatgcatgacccagttcgcgcggctgccacaaggcgcgcaaggataccacttacgttgggtttgtttgttttattttacgggttggcttgggtgggccgctttgtcgcgctttgctgtacgaaataaagaacaattcttcagggcgtagccggatcttctgtaggagcaggctctgcctgcgattgccggacagggcccagctcagcggggccgctagcgtgccgtttggtccggtgtggctcattgcgcttgggtgagccaagcgccgacgatgtcggcccgacggggcgggtcgcaggcagagccagctcctacaagacgggcagcggtgcgcctgtctgctggcctctgctaggtgcggcgactgcagtccgttgcaaaggcgcgccgtttcgggcgttggctagcggctcggtttgctcagcaaggcgtccagcacggcttcgcatgcggcatcccatggcgcgctggagtgttgtcggttcagcacatcgagtcctttggcggtataggtgcctggagtggcgatgccttgccccagcgtgctcaaactctgcccgggctgatggcgagcgctggccacgcagtcctgcagattgcccagcaccagatccctggctttgtcggctggcagacctttgtcggtcagccactgctgtagatcctgaagaaagaagtagaaccagccgttcatgcaggccgcgacggtggccagctcgaagtcgggctcctgctccagtacgaccaggttgccgagcggggccagaatctgttcagcctggtcgtcggatgggcagaccaccaccgtggactggttgatctgagcggcataggagagcatggcccggacgcagcgggcggtagggaaatgatcctctagcgtctgcaggctgaccccggctgccaaggaaatcagcaactgccctggcgctacgctgatctcgccggcaacggccggtacggcatcggggcggacgccgagcagcaaagcgtcggcctggtcgaccacggcctgattgcttggcatcaccacgcagtgctcgtcgaccgccagggccgcggcgccttcgtggttgcgtggcgaaagatagatgatgccgtcgaagcggctgcggcgaaggccgagcaccaccttttcggtcagatcaccgacacccagaatgcccagacgctgcataacgcttaccccgaccgttggtttgctgtagtcgcgccgcgcgcggaccctgaagcccgtcgcagcagcacgcacagacagaaactacaccggctacgccgtgagttcaccaggacaggtgccgttacgccgcgccaggctagctggtgctggcggcgtggtgccggctttggccgccacgagggcgagcacggcgcgcactatcggcgcgccggatctggcggccttagccactccttccattgcgatggattcgacaggaatctcgacgaagcctgccgatcgcagaggaggccgcgctggcctctgtgccgaaggtttcaacagggtgcgctggccgcccggtactgctccagcaacgcctctatcggatgacgcagcttggcatcgttgaaccgtgcggtctggctgcggcaggaatagccggttgccaggggctcggcctgatcgtcggcagcgatggcgcgggcccaggactgctcgaagatcaccttggacgtcgccaggttgcgcgcttcgtgaccataggtgccggacatgccgcagcagccggtcgcctgggttgccagggtgaggccggcctgtttgaacacctggttccacagcgcggtgctcggcgcggcattggtcttttcggtgcagtgagccagcagccggtagggcaattgcgtagcggcatcggcggttcgttccgggagggccttgaccagccactcttgtggtaacagcacttcagggcagatcaagcctgggatctttgcgtattcctggcgatagaccagggtcatcgccggatccaggcccaccaacggaatgtcgaagcccgccagtgcctgcaagcgtcgggcagtgcgcctcgcggtacgggtgaatgcgccgagaaaaccctgtacgtgcagcggcttgccgttgggcgagtacggcgccaggtacacctgaaagcccgcccggcttgccagctcgatgaaggcggcgaacaccggcgtctcgaagtagcgggtaaaggcgtcttgcaccaggatcacgctcctggagcgctggtcggcgctcagttcggcaagtgtcttgggcgttgcggtgatgaccttccagcgccggcaggtaccgctgaaatcgaagttgctgatcagtgggctgtcgaccataccgatgtgctcggccatcaacgtgctgatccaggaggaacccatcggcgcgttgtacaaccagggcaggtaagcgaacaccggcaaggtgaattccagcgagccgatcagataatcgcgcagcggacgcaggtagcggcggtggtacagctcgagaaagcgcgagcggaattccggcacgttgaccttcaccggacactggcctgcgcaggatttgcacgccaggcagccggccatggcgtcgtacacctcatgggaaaaatcgccttcaccgccacgcgtattgcgccagcgggtgggcagcgagcggaggaaattcagcggcccgccaacggccggggtcagcacgtcggcgccggcctgtgcttgcaggcgcagccattctcgcaacagggacgcgcgacccttgggagaatggatacgctcgcgggtggccttccaggacgggcacatggcgtcgtcggggtcgtagttgtagcaggcaccgttgccgttgcagtgcaccgccgtgccgtagctctgccagacgcgttcgtcgatctgccgatccagttcgccacgcatggtcacctcgtcgatcttcaacagtggctcggtgctgtccagcggcgtggcgattttcccagggttgagctggttgtgcgggtcgaatgcgcttttgagcgcttgtagcgacgggtacagctcgccaaagaaggcgggcgcgtattccgaccggacgcctttgccgtgttcaccccagagcaagccgccatagcgctgggtgagctcggccaccgcatcggagatcggtcgcaccatcgccgcttgcgccgggtctttcatgtccagcgccgggcgaacgtgcagcacgcctgcatcgacatggccgaacatgccgtaggccaggccatggccatcgagcagatcacggaactcggcgatgaagtcggccaggttctccggcggcacggcggtgtcttcgacgaagggctgcggacggacctcgccatccacattgcccagcagtcccaccgcccgcttgcgcatcgcgtagatacgcgtcaccgccgcgtggcccacagccagtgtgtggccgaggcgctcgacatgggtgtcatgctgcaggtagtcgatgaacgaggcgacccgagcatcgacttcttcgggatcgtcgccgctgaattccaccaggttgatgcccagcgtcgggcgctgcgattgctgcgggaaatactcggcgacgccgtgccagacgatgtcctgcatcgccagcagcagcaccttggagtccaccgtctcgatggacagcgggctcatggtgatcagcgtgcgtgcgtcgcgcagggcgtccatgaagccggcgtagcgaatgttcaccagcaccgagtacttcggaatcgttaacacgttcagcttggcttcgacgacaaatccgagcgagccctcggcgccgcagagcacgctgttgaggttgaagcgaccatcgggttcgcgcaggtgcgccaggtcgtagccggtcaggcagcggttgagcttgggaaaacgtgcctcgatcagttcggctttctcgcgctggatgcgctcggcgcagcggtagacgtgaccgacgtgatcctgccgcgagagatgtctttcgagtgtcggttcgtccagcggaccggtgcgcaggcgctcgccgcccagcagcacggtgtccagctcaagcacgtggttgcgcgtcttgccgtaggtgcagctgccctggccgctggcgtcggtattgatcatgccgccgatggtggcgcggttggatgtggacagttccggcgcgaaaaacaggccgtagggcttcaaggctgcgttcagctgatctttgaccacgccgctctgcacgcgaacccaacgctgttcggcgttgatttcgatgatgcggttcatgtgccgcgacaggtcgacgatcaccccgtcggtgagtgactgcccgttggtaccggtgccgccgccacgtggggtcaggcggacgctttgatgagccggttcactgatcacgcgagcgagggtttgtacgtcgtccgcatcgagtgggaacaccgccgactggggcaagcgctgatagatggaattgtctgtcgccagcaccgtgcggctggcatggtcacgggcgatctcgccacgaaaaccggccgcacgcagggcgtcgagaaaagcaatataaggcgcggcgggcgcctcggtcgggatgcgggcaatcatggtcgttgacctctgcgtaggctgcgataccttcggcaagtgaaggattggcgcctgactctttatgggttgcgcgcattttcctgggcgtttcagcgtgctacaacggtatttttcgtcgttaacccatgaggttcatgaatgaattatcgccgcctgacgccttcgatgtccttgttgctggctttcgaagcggcggcgcgtcacgagagctacacccgcgccgcacaggagttggcccttacacaaagcgcagtgagcaggcaggtgcagtcgctggaggcgctgctggggatcacgctgttccggcgggaaggtcgcaacatcgtcctgactgacgtgggccgcctgtaccggcgcgaactggagggcgcactgacgcaaatccgcaaggcgacgctgcaggcggtggcctacggttccggcgtcggaacgctacggctggcgctgctgcctaccttcggctcgaagtggctgctgccgcggctgaacgatttctacgcaaccaatccgggcgtgcaggtgcatatccattccaggatccaggcggtggacttcgacgagggcgatatcgatgcggccatcagcgtggtcagcgccgatcagccgggtctcgtggtgcatccgctgttggaggaaatgatggtcgtcgtcgccagcccggacgcgctggccgacgacgaacgggacgatccggcggctatcgcccggcagctgctgcttcaggtcgccagccacccgccgctctgggcggactggtttgtccggcacgggctgaacccggaccagatgcgcgccggccccaatttcgaactgacctcccaccttatccaggcggtccgtgctggtatcggcgtcgggctggtcccgcgtctgctggtggaggacgagctgcgccaaggccatctggtgacagtcggcgaaaccatccccagccagcgcacctactgcctcgtctatccgccgcgcaacgaagtgctgccgtccttggaggcgttcaagtcctggttgctgccggtgccggtcgagcggtgatcgttggttggatggtggctggatcacgactggcagggacggagatagccacggcgaaaaccggttggtgccactcggttgacacgccgatgacggctgctgccgtcgtgctcgatatggggcgtattattcagtatttgttctgaagcccgtagaaacagaaagcccgcacgaggcgggctattctgatgttcccactgggggactggatgccggggggttgaaccccactttttgctccgcgttccccggctaagcccggctttactgggcccatcgccccgagtcgctcgcattgtactgcgttgggccgcagttatttcgacagtttttcgacacgttgtctggacagtttccaaacgtgtcggtagcgtctggccatcacctcgccttctctgagcagttgagtggtcgcttttccgctagtccagagtcgcgttccgttttgctcaagcgaatcaacgctttactgcagggcaaggagcgtcatcaggcatcatgaatgtgtatttttcggcagctatgtcgtgttaaccagaagttaaagttcatggaggaagccgtgcatatattcgtaagcagaccaaattgggtttcttgtgaatatgagatgggcctggatacatttctgaaatcgatggcgcatatggggttaattcctagaacgttaggctcaagcgattatccaagcaaggctcctctcgatgaagtaattgaaataatggatgagtgccaaggagcaattattcttggttatccacaagtgcaaatttcaaaaggaacgatcaaaggaaacttgctcgaaagcgagctaactttagccaccgaatggaaccacatcgaagctgctttggcatattcaaaggggttgccaattttggtaattcaccacctcacagtatcaagagggatatttgatcgcggcgtcatgaacgccttccttcatagcgtcgatctgagatctccaacgtggtgcatgaatacttctcttgacggcgctattgcgaagtggaaagagcactgtcagtccggaaaatcaaactttctagcaactgctgccgtcgacccaagtaaacccacgtgccccaattgctcgacaaaggcaaagccaatatatctaagcaagctgccaaatggcatgcgtcttgggaagtggcggtgcccaatatgcaattatcttgagtagcataacttcttgtatttgctaatcccggctagccttgcgagctgggcgcaagaagttacaatttttgaccgactagcatagtcgttaatactgttacttccacttcgctcccggcgctcgggcataccatcgcctagctactttccgtgtgattgctatcccgcgctgggttggctcaagtgctttcatggctgacgaacgatcagatcgccgaactgctggagtcgatccgcaacggctgcgataaccctcacgtcgaaccggttgtgatgatctgcttggcgaccggtgctcgatggtccgaggcggaaaagttaaagccgaccagtgttcgtaatggcgtcatcacgttcagcgggacgaaaagcggaaaggtgcggtctgtgccgatctcggccgagctggagaagcggatcgtgaagcactggaagcagcatggcccgttcatgcattcgatcacttcgttccgccgagcgctcgccaggacaacgatccggctaccgaaagggcaggccgcccatgcgctgcgacataccttcgccagccacttcatccagaacggcggaaacatcctcacgctgcaaaagatcctgggtcactcgagcctggccatgacgatgcggtatgtgcatctggcgccggatcatcttcaagatgcggtacggttggggccggctttaccttgagtaacattattccgttgagggaatattccataggagctatatttcgcatgacttgggacgttgagtacaccgatgaattcggtgactggtgggagtcgctctcggctgaagagcaggaatccgtcgcggtatccgtgctgttgctagaggaacgtggaccctcgcttggctatccgcatagcagcgccatcaacgggtcgcgccatgggcatatgcgtgagctgaggacccagcacaacgggcgcccgttccggacattgtacgcattcgatcccaggcgctcggctatcttgctgatcggtggtgacaagacgggcgacaaccgctggtacgaaaccaacgttccgttggcggatcgtctctacgatgaacacctggaacagattcaaaaggagggctgatagatggccaagaagtttgcagacttgcgggcaaaaatgtcgccagaggctcaggctcgcgtagagactaaggcccaggaactgcttgctgaaatgccgctgaatgagctgcgtcaggcgcgtggtttgtcacagaagatgctggccgagctgttgcatgttcagcagccgtcgatcgcgaaaatggaaaagcgaaccgacatgtacatctccacgctgcgtagccacatcgaagctatgggcggacagctcgaggtagttgcccggtttccagatggctcggtgaagatcagcaactttgccgagatcgaagctgccgctcagcaggcgtgagccttcgacactctttcgacatccgctatcccagaaagcaaaaaccccctgaaattcactaggaaaatcaggggtttaggtgtttcgaattggtggagccggggggatttgaatcccaaacttcaatatcccggccaaatcaaggcttcagcgcattgtgcaagaaaccttgatttgttggattgctcacagtgagcgcgagtatatgaacctttcgagtcttgtcaagcatcgcattcccctatctgtgagagcggttttgcatgcattggcgagtagagcaatccgaaatcggttgggtttaggctgcgttgaagccaaacgttccctgggtttgaaattgccaatgaactagcgaggcgtttcgggtttcgaaggtgttcccatgggctctcgatcatgatcaactcaactctcggttcgctcaaggcgtggttgccagtacctgatgggcgaaggtaaccagctcagggcagtcaccgttgttgctggttcggtcgacaaaaaagcctcggatgcctactgccattggcccatctcggtcgcagcgttgggagtcacctaccatccatgatgcggttggggatgccccaagccgatcgcaaacccaactgtagatagcgggttccggcttcattacgcctaagtcacagctaaatgcatacgcgtctagcgtggggtaacaacgcaggacagcttgccggtacgggaaagccaggttcgagcaaacaccgattcgaatgccttgttcttggagcagtttcactgcttcgagtccgtccggatatgcctcaacggctgcaatctcatccgccaggacagtttccagagcgctcaattgttcagggcttgcagtaatccctaaatgcgctgcggcttgcgtcaaagtaatcggagatttcatcaggacagacgcgtcgtccggacgggagcgccgaccatgcgcctttccgatcttcatcaattgccggtagggatgcgacccatcttggatcttcatcagtgtcccgaaagcatcaaaaataacggcttgtatggtcattactcatcccgttacgacagggtattcgtaggccggcgcattcaaccgacgtgtttgattggccctgagtacttcgctatagcgtgatcactggttacgaggatgaagccttccgtagctgcttgtccgatgagcatccggtcaaatgggtcactgtgaagaagaggcaaggccgcggccgcaatggcgtgttggctggtcatggtcagttccgtgtagtcgccgtccagaagagcccttcttagcactcctggatcgaactgaaagctggctttgcccattgcgtttttaatgccgatttcccaaatgctagcggcgctgaagaacagctcattggcgcgatcctcgatcatctccacagcctctcgtgggagagatgatggggccgcgcaggcccagagtaggatgtgagtgtccagcagcagcttcatacgccaaacatcgcttcgatttcgtctcgaaaaggcgcatcgatatcgtctggtaccgcaaaggcaccgctaagcatgcccaatcgcggtttggcttcatgatcgactgcgacaacacggaccataggcttgccagccttggcgattatgaacgggttgccttggctcgcctcgaggatgagctgggacaggtgagttttggcatcgtggatgttgaccgttttaggcgaagtgccgagatcgctttcagatttcatcgcctgccacctcaggttagctaagctgcttagtctattcccgctggggcgagggggcaactgtcgtcgtcagctgcgagctgttatggctcgcagtttgtccgtaacgttgcggttatcagaaattatgaacaagccataattattgctgagccataattccaattaattcgtggcgccgctgtagataacgagggaatcgcgcctgttcccttccgcgtcacagacgcgcctcgcttttcgaaacaacccatgcttgtgagcaattttaaaattcgaaagggcgactccgggccggttgggtcagcatcgcatcgaccgcgacgagagggctcgatcacaattggttattcatagtgcccaagacctacgtccgattggtagttgtttttgtactgttcgggtcggtaagtaacgcgatcttgtcaatatatatgtatcagatataccgatggtcgatggttgccttttagttttctaaaagtgcttgacgtacagtgttgaggattagattatctcctcgtcttgagatgttaaattgttctatagctgagcgagtaggccgttacccctgtattgaacagataaggaagtgtcgtggttttaatggttatgactgatgtggattctatgctggtcgtcgcaagctctatttaagttaatagttgtaggccgcctattcgaccgtcaagctataaataggcgatagtcagagccggaagtaattggaacgcatattgttaatccttggggcaggttcgccggggcagagaagtatcgcctaaattatacctattgagatgttggcagttaaattaaggaagagggtatggacgatttaaagaagatatccaatttattgtatgctccgggtgaggtaatgcctggcatcgaaatgccgttggaggaggcgtgcgcgcggggtgctgcggctgctttgtttgatgccatgccattttgtgctgtgcgtgattgggtttggattgatctgatcgttcctgaatcaataggagaaacgttaaaagcatccgggcaacagcccgtgatggtgtatgcaggccacgtgttgtatgacagcgctcgccgtttcgaagcgggtgactgggtgcggacgacgcaacttgttgagttcgctgacgagtgcatttttagaacgcgcaatacgcgatatgtgcttgttgggccgggcgttcgtaagagcgctgagctctctactgtcttcagtatcttatggtaggcggctcggtatggcggagggtgaacatggcagttctagctaatcgtgataacgatgtgcattgcgacgtttgtggtacctccactcgggtacctggttacggcgagcaattcggcgcgctacaagcgagttgggggtacggcgcgcgtcatgacggtgagcgttaccgcgtccgactgtgtgagtcctgcttcttcatggctttgtcgtatttcaggcaggagcgacgcgtacatcacttgtttgatgacgcaccgcaagatgacgaccatgagtttgggcgtatcgctcgcgatgactattgggccgacagctagccgagtatccaagccgaatagcggagttcttgatatttctttcgtccacaaccgagtctcgttatgcatattcatctcctttcagatttgcatcttgaagtgagctcttacgtgccggctgctacggacgctgatgtcgtggttctagcgggtgacatccatactaaagcccgtggcgttcgatgggctttggatagctttagcggaacggttctctacgtgccaggtaatcacgagttctactccggccacctgacccacacattggtgacgatgcgttccgccgctcgggacggtcgtgtacaggtcatgaatatgcaggaagctgagattgaaggggttcgctttcttggatgcacaatgtggacggactatgcggccgccggcaacgcccatcaggccggtttgtatgcgcgttcgtgcatgaacgattttcggtacatccgcaccgagtcgttccgacggatcgtaccgaacgatttggtgcaggaatcagttagagcgcgttcctggctgcgctcgaaactagacgagccgttcgatggaaaaacggtggtgatcactcatcacgcgccatcgcttcgctcgctgatagatagtcccgatgcggggacattgctcgatgcagcttacgtcaatgactgtgaacatcttatgggtggggagcgcgttgcgctctggctccatggccattcacattctgctgtggattacgaaattcgcggaacaagggtggtatgcaacccgcgtggttatccatctgaagaaacgggttttattccaaatttggtgctcatggtatgacctcaactaagcggattgtcgaacaaacgcgcgatgtggcagaagctttggcgcgagcgatgggcacctctttcggcagggaagttacggcgtacctaacggacgcctttttagtggccggctgttgtgtaggcgtggttcatcgtcacgtgcgagctgacgtgtatgggcggtttgaagacgggcaccgggttcgcacctccgacgtcttggaggcccatgagcagtatgggttttggacgctgtataccgccacggggagcctgtacgtcattgcgacattcttaaaaggcagcgggcgtcgttcgctggatgtgctgctggagcaaagagcgaaaggtatgcacgccacccctgcaagaattcagtgagccgtctgggacgagacgaatctcacataattccgttaatagtgtgtccgtgattcatatgtttaagaggtaccgatttaataagctgaaagggcactactttagtatttgctacggaaaaagattctactttttgatctttagccggaaggccagagcgtaataaatggctctactatataccaaggccggataggcgtattgcaaaagtgcggtcagttccggtgcgttaaaaaagttagtcgaacagcgaaacgtaagcgtaactaatcgctagcaccgctagttttcaatactgaatcccggctgcaaactgccctagcaaacatgggaaaggtaaggcgcatgggtctgctgataatatcgacgaagcggacataggttcgtcgtgctcaaaccaaccgcgctcctatttcatttgagtaaccctttgtctagacgtattctagagttccgcaagttatcgcacttctaaaataagtatctttatggtcactttagaaatggctcgctccgcaggccaagttcttttgcttggccggtacgtaggcaatattgtgaggcatcgcaaggctgcctgttactctgtagctattgatcggcggggcagcgcggattcattgttatgcggatctgtctattgacttgtgcttggtaaagaacagccacaataatctacgcatttgtcggtattcgtctgcttgccaacgcctgggttactgtgtgacgcatcggttccagtatcaatggatattgatatcgaatgttggcgctgatggaaaattgacccaccctgccgattgaaatttgacccagggcggattgctgattttgttaccagcaactgtggataagtctaccagcgcagctgctgttgctcccactccttcgctagcccagttcagttgtttaagacctgccacacgcagccatgtagcaggccgtcgtcgccatgaaatcagaacggctcatcgtcctccggttcttggccgcccttacgctttcgctcccgtgatttgatcttggcctgggccgccaagctactgtgttgcaggcgataggactcgttaccggtttcgacgatgtggcagtggtgggtcagccgatccagcagggcggtggtcatcttggcgtcgccgaacacgctcgaccattcggcgaagctcaggttggtggtgatcaccacgctggtgtgttcgtacagcttggacagcaggtgaaacagcaacgcaccgccagcctggctgaacggcagataacccagttcgtcgaggatgaccagatccatgcgcagcagtgcctgggcgatccgcccggctttgccgtcgtgtttttcgcgctccagcagattgaccagatcgaccgtggagtagaagcgcacgcgcttaccgtgccgggtgatgccggacacggccagcgcggtggctaggtgggttttaccggtgcctggcccaccgatcagcaccacgttctgcgcggtgtcggtaaagctcagattggccagctcgctgatcaagcgagcgtcggcgctggaggcgctgaagtcgaagccggccagatcgcggtgcatcggcagcttggccatgttcatctggtggctcaccgagcgcatggcgcgatctgtgtgctcttgttccagcaggtgttcgagcagccacttggacgaggctgtgttcgactcaccctgtgcagttaactccgcccaggccgtggccatgccgtgcaggcgcagctccttgagttccgccatcaaatcacgcatgaccgacctcctcggcctggccacgcaggcggtcgtagcgcgccgtgttggcgacgggggcttccttgagcgacaagtgggtttcgacgctgggtggtggttcggtcgcggccaggcgcgccacgacattgaggatgtgttcggcgctcaggctgccgctttccagtaccagctcaacagccaccagcaccgcatcgagcccggcgaccggtacggcagccagaacttgcgccatgatccggtcaccgccggcatgacgccccagaccgtgcttaagctgacgcagcggcgccggcagatcagcaaagggcgcgccgttgcgcagcgcaccgggcttgcgttcgatcagcgggaggtagtgctgccagtcatagctgacctggtcgcgatccagcaagcggacatggctggcgatcagcgcgtcgtcagccaccacctcgattcgcgtcggatacaaacggctgctgacccacttacccgcgtactcacatggcaccgagtagcggttgcgcccgacgctgaccaggcaggtgctggagacccgcgcaggccgctcgacgtaaccgtcgaatggcgctggcacaggcatcagttcagcgcgctccaactccagcacttcggccacactcagcccgctgtattgagggtgcgtcagctcgttccaaagcgcgcggcagcgctggcccagccaggcattgagttcctcgaaggagtgaaactggcagtcctgggcgtctagccagatacgcctgcggctgtcttgcacgttcttttcaacgatgcccttttcccaaccagcggcgacgttgcagaagtccggatcgaacaggtaatgcgcgcacatcaccgcaaagcgcgcattcaccgcccggcctttgcccttattgaccttgtcgacggcggtcttcatgttgtcgtagatgccccggcgcggcacgccgcccaaggagccgaacgagcgtgtatgggcgtcaaataacatctcatggccctggctcggatacgccacaagccagaacgcacggctggcacacagcttcagatgtgccacctgcatacgccggtaaatgccgccgaccagcaagccttcctcgctccagtcaaactgaaacgcctcgccaagagcaaaggtcagcggcacaaaggcctgcgacgccttgccctgtccccctcgccaggcacggataaacgcggtgagctggctgtagccaccgtcataaccttcggctttgatttgcgccaacagcgccttggcactgcgccgctgttgcttgggccgcagcgaatcggcttttagcgcctgctccagcgtggcgtgaaaagggctgagtttgttgaagatcgcgcggcgttggtagaccggcggcttggcctcaggtgctctgacccacttgcgaatcgtgttgcgcgccaacccggtgcgcttggctatctcatgcagcgacagcttgtcgcggaaatacatccggcggattttgcccatcatttccatactgatcaccctgtgttctcctgctcaaaaattgagcaggagcagttgaacacctgggtcagttttcagtcggcagaacagcctctactgggtcagttttcggtcagcggcaacaccatggaaacggattgtgtctatcaaagtgtgtttcatgcagaacggtgcagatgcgagtggtggtttccacggaaacgtgttgtgactgcgaatggttgtttccatggaaacaggggcagctgcgagtgactgtttctacggaaaagtgtggtaactgtgaatggttgtttccatggaaacaaggggtagcttcgaatggcgggttccgcggaaaagtgttgggactatgaatggctgtttccatggaaacaagggtagctgcaagaagcggcttccacggggaccagttgcagctatgaatgggtgtttccatggaaacacgatgcgctataaggcacacccttcgccgttcagatgagatcaagtcctctttcttctacgtttcctgtaacctattccttagtttgcgtatggttatatgtgagcagaatcgagccatttgaatggcagactagggttcgtctggtcaagatggaccgcagtctggcttcagcccaaagctgcggtgatggctgactaggtctatggctgagcttttccagtggcgagggctatcgcttaaccaatctcgtgctgtttgttcatgacaaaaaggtgatttcagcggctgtttgtcgaggcgaccatctagccccttgcacccgagccctctcggaaggcaatgcttcgtattgcttaggcaatgcgattgcattaccatgcggacgtcaatccagatccgcaggagactgccatggccgcgaccttcgaagtcgaatccacccttaccgatcgctaccagaccacggtgccggagaccgtccgtcgtgctctcaagctgggcaggcgcgacaagattcactacaccattcgccccagcggagaagtggtgctaacgcgcgtcgaagcatccgacagcgacgacccagtgctcggtcagttcctcggctttctagctgctgacatcacacgccatcccgagcggctgcaatctgtggatgccgggctcgtccaacggctccaatcattggtagccggcgtcgatgtcgatcttgatactgtcctgtcggcggacgatgaatgagcgcagggaagcccgagcctcttgttattcatggttggacggtttttgctcatccactattcctcgcacagatggaagcgctggcgcggcaagtcgagacccttaagcaaaaagaccccgtcgggtatgtgaagaagaatgccagtaaacgactggccgcgatcatcaagctggcgtttgatgttattccacaagatccgactcgatcggaataccgccagggcgggacgctcggtgacgatcacaagcactggtttcgcgctaagttctttcagcagtaccgactattttttcgctaccacgccccgagcaaggttatcgtcttcgcttgggtgaatgatgaagacacaaaacgcgcctatcaaagtagcgatgacgcctatcgcgtgtttcgaaaaatgctcgaaagcgggcacccgcctgacgactgggatcggctcttggctgaggcgcaaatagaatcgctgcggatgcaagaatcattcgcaaaggcgacaacggtgcagtgatagctgtttccatggaaacacggcgtagctgcgagtgacggtttcgatggaaacacgatgcgccataaggcacgctcttctccattcaaggatgagatgaagcgctttctccgctacgttccctatgatcgctatttctatagtttgcgtatggttatatgtgagcggtatcgagacatttgaatgccacactacggttcgtctgctgtaaacgaacctaattcccggtacgtccaacgcggctagaagggggacgagtagcgcattggcttgagctggcttcggcgggaaagaatggtctcgatttgcgagagccttactaggtctgtagtggtcaatccatcccggatagtgggttaagttttcctcggccaccgcaggtggtagcccgtcgttaaattgatgcggtctgatccagttgtagcggtgcattaggtagtggctgatgtctcgctgggcctctagggaaggtctgaagtaaccctgtatttccggtcgacttcagccctcgctgcttttgaaagcgggccgccgatcaaaatcgaccaggtaacccgctcagttctccgtttttggccgccgcgagcacctcgcagcagccattttccgcattacaggtgcacctttcctgcggtagtcagcaaatgtcggcgcgccatccataggttcgacagcgcgaacagcgtcaccagctgagcggtgttcttggccaggccacggaagcgcaccttcacgtaaccgaactggcgcttgatcactcgaaacgggtgctcgaccttcgctcgcacttgtgccttggccttctcgatcttgcgcttggctttgtacagggcgctgcgtttatcgagcttcttgtaggtgctgcggcgtgctgcgacctgccagatcacttcgcggccagcatgttcggggcgcttttcgacgccggtgtagccggcatcggcgcagacgacgttctcgtcaccgtgcagcagtttgtcgacctgggtgatatccgccacgttggctgccgtgcctaccacgctgtgtaccagccccgactcatcatccacgccgatgtgcgccttcatgcctaagtaatactggttccctttcttgctctggtgcatttccgggtcgcgcttgccgtcctggttcttggtcgagctgggcgcgtggatcagtgtggcatcgacgatagtgccctggcgcagcgacaggccgcgatcccccaggtagccattgattacgccgaggatgccggctgccagctcatgtttctccagcaagcgacggaagttgaggatggtggtttcgtcgggaatgcgctccaggctcagcccggcgaactgacgcaggatggtcgtctcgtagagcgcttcttccatggccgggtcgctgtagccgaaccagttctgcatcagatggatacgtaacatggccatcagcggataggctggacgaccaccttcaccctttgggtagtgtggctcgatcagggcaatcaatcccttccacggcaccacctgatccatctcgatcaggaacaattccttacgggtctgcttgcgcttgccggcgtactcggcgtcggcgaaggtcatctgcttcatggaaaaactcggctggcgggatcggcgtatttcaccagattcgggaagtctttttcagaccttccctagggctgtcagataacctgttgccgggatccattctgacttcaggctgcggaacaggcgctccatcggcgagttgtcccgtcaaagcttgcatccaccctgcgggtcgccccatagacacctcgatcaaaggtgttgcgacgaccggttgaatccgccctggctgcactccgctcgtccggtatcgtggggtcacggtcgaccacgccttggagatggcagagcaaaacgaggcttaggcgtcacacacagcgacggcctcagggtagtcgccagacaccgcgggaaatcaatacagcccaaacaccggtcagctgaacgcagcaactaggtagttgcctggcatagcgttcagggcagcagggcgagcgcttagccccgtcggctgcgaaccgtttgcccagaccacaatgccgcatggcgggccggcctcttcttccaatgcggtatggctgtggtcaatggacgctctgagcagcctgcagaccgatctcccggatcagcttgcgtgcgggttcttcgcccaggcattcctcacggaccaggcggaacagctcatcgcgttcggcgcgcagagccacctggcgcaactgccgctcaattgtgaaggtcagatgccttgcctgccttgcggtgctggcgtcagctgaggttcgccggggccgcaagggtcggctggctgtgccgcgccaccgaggcgcacacgccgccgagcagcaggacgatagcgccggcctccagcagggtgggcaggcgctgcaggtagacgaagccatagaccagtgcaaatagggtctcgaagacgatcatctgccccgacagggtcagcggcaggcggcgggtgctggcgttccagaaggtgtagcccagccaggaggcgatcacggccagccccaggttgagcagccagaagacctgccagcgctcggcaggcacctccacctgcaccgcagcgaggccgagcagctcggctaccagccagatgccgccggccagcaggccggtgatcacaccgctcagcagcgaccattcgctgctgttgaagtgggtctggcgcttcaggcagcgtgcattgtcggtggcgaaccagctccagcaggccagcgccagcaccgcgtagaccatgccctgcacccgctcgtccagcggctggctctgcccgctgccacccagcagcgcctccaggttgatgcagacgatgccgaccagcaccgccagcagcggccagagcagccggcgcagggcaggggcgtcggcctcgttgcgcccgagcagggtgatggtcagcgggagcactccgatcaccagcgaggtcgccgcgatgccgacccgctgcacagcggcggccagcaggacgaagtaaacgatattgccggtcagcgacaggcgggtgagcgccagcaagtccgccaggctgagcttgcgcagcagaccgcgcgccagcggcaggccgatcagcagggcgatgacgccgtacatgaggaagcgcccgcagctgagcagcagcggcgagaagtcggcgagcagcgccggggaaaggaacaccagcccccaggcggcgccggccaggctgccgtagaaaacaccttgtttcatggtctatccagagggcgcggagcccgtgtgtcgggtggcgtatggtcgcacggaacccgcccgcgccgctggcgcagggggcaaggtcggggttgtggcgcttgggtcaggcagcctgggtcaggccatggtcaggctgccctgacgttcgttccaggaggttaggaactgctgcaggcgcgcgctctgcggcgtattgaacaggtcccggggagcgccctgttcctcgatgcggccctcggcgaggaagaccaccttgtctgagaccctggcggcgaagcccatctcgtgggtgacgatcgccagggtcatgccggcatcggcaaggtcgcggatgacgttgagtacctcgccgaccagttccgggtcgagtgccgaggtgggttcgtcaaacagcatgatgctcggctgcatggtcagcgcacgggcgatggccacccgctgctgctggccgccggacagctggccggggtagctggcggctttgtggcccatgccgacgcgctccagttgtgcttgggcgcgctcataggcttcggccttgcgcacgcccttgaccaggcgcagcggcgcggcgacgttgtccagcaccctcatgtgcggccacaggttgaactgctggaacaccatgcagacgtcggtgagcgactcgcggatcttctgttcgggcaggcggtagggttcgccggtgaccgagctgccgtaaccgatcatccgaccgttcaccagaacttctccgccggtgtactcctcgaggaagttgacgcagcgcagcagggtggacttgccagagccggagccaccgatgatgctgaccacctcgccggggcggatatcaaggtcgatgcccttgaggacatggtgcgcgccgtagtgcttgtgcaagttgcggatctcgatggcgtagggttgggacatggcgggttcctcagcggcactgatactgggtgaagtggcgttccaggcgcgccccggtggcggccacgacaatggcgatggcccagtaggccagggccagcactgcatagggttcgagcatggaatagctctgggtggcgatggtcatcgccacgttggtcagttcggccacggtgatgatcgacagcactgaggactccttgaccaggatcaccgtctggcccaccagcggcgccaggcagcgtgccagcatctgcggccagagcaccacgcggaacgtctgccccgggctcaggccgaggtcgcgcgcggactcgatctgaccgcgcgggatggcctcgcgcccggcccggaagatctcggcgaagtaggcggcgccgtacagcgccaggccgaccagaccgacccgttcggcactccactccaggccgatgtacggaccgccgtaaaagaccaggaacagctgcaccagcagcggcgtgccgcgaaatagcgcgacgtaggcgtggtacagcggcaccagccagggtccgccgagctggcgcagaccgtgcagcgccaggcccagcagcaggccgagggaaatgccgccggcactcatcttcacggtcatccagacaccggcgaggattgcctcgcggtgttcggcaagcaggttgaagtcgatcatggccagtctctcaggcggtgcgcaggcgggattcgagccagctgcccaggcgtccggtgcacagggtcaccagcaggtagagcagcccggccacggcgaagaactcgatcgggcggtaggtggtggaggcgagggtctgcgcggtgcgcatcagttcgtgcacggccaccgcggagaccagcgcggagttcttgatgatgtcgatggtctcgttggtcagcgccggcagcatgctgcgcagtacctgagggatctgcacgtgcagcaaggtctgcagcggcgacaggccgaggtcgcgcgccgcttccagttgccccttgggcagcatctggaatcccgagcgcaggatctcgccctggaaggcggcgctgttgagggtcagcgccagcaccgcggcagccagcggcggcaggctgatacctaccgccggcagggcgtagaacaccaggatcagctgcaccagcagcggcgtgccgcggaaaaagctgacatagaccgcacagacgcgacacagccaggctcggtggccggtcaggcccaggcagatcgcccagccgagcaccagccccagggcgatggcactgagcgagaccagcagggtgctggccagaccgaccagcagctgcggcaggtggggaatgacggcggtgaagtcgaacatggcgtggtcccgtgctggcgatggatggcgatcagttggccggggcgggcacctggtcggctggcaccggcatctcgaagccgaaccacttgcgctgcagttcggccagcttgccgctctggttcaggcgggcgatgccgtcactgaagaactgcaccagcgaggcgctgtcggcatccttgcgcccggcccaggcgtagtaggtggccgggccgaagggcggctggacgatctcgaacacgtcggcacgctccttgaccagcggcgcgaggttgggtagcgactgcaccacggcatcgacgcggcgcgaggcgagggcggcgtaggcctcgttgtagtccatgaacgccttgatctccttcaccccggcgccgtgctgcggtttgagcacctcgttctcgtaggccttgagcacctcgatctgcggcgcgccggactggctgccgaccaccttgccgaccagatcgccggcgctggcgatgcgctcatcacccttgcgcttgagcaccgccacgctggcggtggcgaacggcacggtgaaggcgaagctctccgtgcgtgcctgggtaatggtcagcgaggtggcgacgaagtcgaagcgctggctggacagccccggcaggatgccttggaacggcacgtcgagctgtttgagcgtgacccccggcagctccttcatgatctcgtcgaggatgtccttgccgtagccgacgatcttgccgttctccaacatttcaaaaggcgcatagcgcgcttcggtggcgatcacgatctcgccgcgctgcttgatgtcggcgagcaggtcggcatgggcggtggcggcgtgcagtggcagtagggcaccgagcagcaggggagcaaacagggagcgaagcgctttcatgggatggtccttcagggagttggcgatggctcaagcatgttcagtgccgattttctcctcaaacggctttttctaacggcgagccattaggccggctaatgccggcacgaatcctgctgggatgggcgtatccaacagagtgattgccatgcccccatcccgtgccttgccgtccctcgaaggtctgcgctacttcgaggccgccgcccgccacctgagctttacccgcgcctcccaggacctgttcctcacccaaagtgccgtgagtcagaagatccaggccctcgaacagcacctcggctacccgctgttccatcgcctgccgcgcggcctgcgcctgaccagccatggcgagcgcctctacgccggggtggcggaggccttgagtctgattggcgcgaccctgcaccagattggggacgaggcgctggcaggcaccctgaaggtgcgcgtaatgccctcgttcgccaccaagtggctgttaccgcgcctggccgcgttcaatcgggctttcccgaacatccagctgcaggtggatgccgacctggccccgcccaacttcaagggcgacgaggtcgacctggcggtcacctcgatctggaccgacgatgcccgtctggcccagcgccacctgttcgaggacctgatctacccggtagccagcccggcgctgctggcgagctgcccgctgcacgactacgccgatctggccggcaccaccctgttgcacgactcgatgccgcatgcggcctacagcaccaactgggatgccttcctgtcgcgccagggtcgctacgacgtcgatacccgtggcggctgcggctattcacgtgccgatctggtgctgcaggcagcctgcagcgggcagggcgtggcgctggtgcgccattcgctgtgcgccgacgacttgcgccagggcatcctctgccgccctttcgccgatgtgctgcacgatggccaggtctggctggtctgcccacaggactacgtggagcgcccccgggtgcaggcctttgccgagtggcttcagaccgaggttggccagcacctgcaggatcgccaggcgctgctgggcgcctgagcgccattaggccggctaatggctgaggattaagaatcgccgtttgttcgcctggactgcccgggaggatgctgtggcccacatcctctcaacaccgaacaggagtcccggcatgagcatgcccagccttatcaacctgcccaacgggccgaaaatgcgcgccactttcagcgtggcggagatgaaccgtcgcctggccatgctgcgcgtccagatgcaggcgctgcagctggacgcagtggtgctgacctcgatccacaacgtcaactacttcggcgacttcctctactgctccttcggccggagctatgcgctggtggttacccaggaccgctcgacgctgatcaccaccaatatcgacggcggccagggctatcgccgcagcctgggtgacaacctgatctacaccgactggcagcgcgacaactacttccgcgccgtgcgcgaggcggtgccgcagggcgcccgccgcgtcggcctggagttcgaccacgtcagcctcgatcaccgccgcaagttcgacgtcgcgctagaaggtatcgagttcctcgacgtggcgccggccaccatgcgcatgcgcatggtcaagtccgccgaggaaatcgagctgatcaagatcggcgcggcggtggccgacatcggcggcgccgcttgcgtcgaggcgatcgccgagggcgtgccggaatacgaggtggcgctggccgccaccacggcgatgacccgtgagatcgcccgccgcgtgccgcacggcgagctgcgcgacacctggacctggtttcagtccgggctcaacaccgacggcgcacacaacccggtcaccacacgccgggtgcagcgcggcgacatcctctcgctcaactgcttcccgatgattgccggctactacaccgcgctggagcgcaccctgttcttcggcgagccgagcgagcgccatctgcagctgtgggagatcaactgccaggtgcacaagcgcggcctcgaactgatccgccccggcgtgcgctgctgcgacatcgccgccgagttgaacgagatctaccagcagcacgacctgctgcagtaccgcaccttcggctacggccactcgttcggcgtgctcagccactactacggccgcgaggccgggctggagttgcgcgaggacatcgagacggtgctcgagccgggcatggttgtgtcgatggagccaatgatcatgctgcccgaaggccaggctggtgctggcggctaccgcgagcatgacatcctagtggtacaggcgcagggcgcagagaacattaccggcttccccttcggcccgcagcacaacattctcggagtctgaagcatgtcgtggcggttgccggcgccgcatttcctttggtgtgcgcgccgggcatccgtaagtctgtcgccaggataagctgcgtcttgcggagagaatgtgtaaacgctatgagcggtaggggagggttggtgctgaagcgcgacagccgtcagcaaatcttcctcaacgatcacctggcctggccatagaggctgcggtagatggtatcgaatgaaacctgatttggccgcgttcgtgtatgtgcgtttcaccgagtcgactgaacgactgcaacggcttttgaaatatcttcgctcgaccggcgccgaattcaaacaagaacaccggtgtaggggtaggcaatacccctattccgcaaggatccgctggacggaggggagtggtttcggtcaaacattttagaacgttgccggcgtgttgacccagagtacgcgtaccacttcattcgaggtattacggtaaccgtgcggcacgttgctggggaagctgaacgagtcgccgggttgcagcgtgtaggtctgctcgtcgagtgtgagcaccaagctgccttcgagtacgtagccaagttcctccccgacatgctcgatcaattcactgaccatgcctggggcgatgatgtagatatcggcctgcaacagtccgcccttatgcggataagtgaggcgttccaggtcgatagagccggcgcgctcattcttggcgaagcggctcacctggcgtgcaccggcgcgctgcaccggctcgtcagcggcccattgttctgaagtcagttcagacacgttgctgcccagcgcctgggccaagcgatgcagcatcgccagcgatggcgatgctgcatcgttttccaactttgagatcaggctttccgagcagccggcggcctcggcgacctgctttagggtcaaacccaccacccggcgtgcgtggcgcaggcgcagccctaggctgggcaggccatcggtatggcgagccttgctcgacggcttgatagtgttgctcattcattttccttaacaggtccgatcatgcggtgcccgcgctgcaacagcgcgggcattttatggacaaccgcaaatcagccttgaaccgagaaatgtacttccaccgggttcaggtcgttgatcggcacgatgtcttgcgggcaggctgacatgaccacgaccatatccatctcagcacggatctcgacataatcgccagcttttgacaccggcggcaaccactcgacgctgttgtcggccctgacggggatgttcatccacaaattgaatggctgcggcacttcgcgggcccgcaggccaatggcttgcagggccaggcgcatgttgtctgcgcagctgtcgtggtacccctggacgcccaggttggtgtagcggaacaggtcgcaggcggccatcagggtgtcgtggatacctggggaggtgtcggtcaccaaggtgccaattgggcggcgacggttgctgtgcagcgcctggcccggcttggggatgatgttgttgcagtgggcgcgggcgtgctccaaggagaggaattcgctcatgtcctcgcggttgaacagccaagtatcgcagacctgagtgccatgggtattgatgatcttgatcacctggccggccttgagcagcaccgcgcgaccgcagcgggcgggcacggtgtagagctcgcccagcatcggcgtgccgtcagccgaaagcggctcgttcagggtggcattcgcgcccaaggcgcagccgttgtccggctggcagcacgcgggatagtcatgagcgtgggtaagtgtggtcatgttgatactccttggatctagggttgttcggcgagtgcaatcagcgcccaggccagtgcctgggcgcctgttgtcagctgcgcgagttcggtaaattccagcgggttgtggctgatgccatcccggctggggacgaagatcatcgcggtcgggcagtgcccggacagatacatggcgtcgtggaaggcacctgagcgaattggctgatgactgcgaccggtggcggcgcaggcctgctcgacaacattgaccacctcgccatcgaaggacgtgggcgcgtgactgaacaggcactccagttcggcgtcttccggcagacaactggccagctcggtgtcgaacgcctgtagcacgacggcgtccgcatgacggaaatcgaggctgaagatcacctcgttggcgatggtgttgatggcgttgggtgccacggtccatcggccgaaggtcaggcgcttgtcgtcggcatggcttaggcgatccgccagcgcatcaatgtgctgcagggtttcgatggccagcagcatggcatcgcgacgcatgctcatcggcgtagtgccggcgtgtgccgaagcacccttgcagcgtacctgataccagcgcacgccttggatcccggtgaccacgcccagatccttgccggcctgttccagcaccggcccctgctcgatatgcagctcgacaaaggcgtgcgtggcaatctttccgcgcagcggcagatcggcgaaacgccgggcatgggcctccagcgctgctccgacgctgacgccatcggcatcgcagttatcacgaaactgctctacacggccgggttcgacataggcgctggaacccatggctccgggagcaaagcggctgccttcttcattggtccagaccaccagctcgatcggccgccgggtctggatgttggaagcattcagcgcatgcaggcattcgaggcctgccatcacaccgtagcagccatccagggtgccgccggtgggttgcgtatcgatgtggctgccggtcatcactggcggcaggtctttgataccggcgcggcgaatgaagaggttggcgcaggtgtcggtaaagacctcgcagcccagcgcgcgggcctgctcgatcagccaggcgcgggccgcgaaatcctcctcggacagtgcctggcggttcatcccgccgtgctcgccgggaccgaaggttgccagcgtcgccagcaactgctgcaagcgttcgctgttcaccgcctccaatgcctgttgcgcactcatcccgccacctcggtgcgtggcgtcaggctgcggttgaaccaaggctgcaggaagcgctggaggcgttcggttttcggcgcctcgaacatggatggtgccacaccggtctcgacgatctgaccagcttccatgaacaccacctgggtggaaatctgcgcggcaaaactcatctcgtgggtcaccatgaccatggtcatgccgtcctcggccaggcccttgattaccagcagcacttcttccaccagctccgggtccagcgctgaggtgggctcatccagcagcatcaaacgcggattgaccgccagggcgcgggcgatgccggcgcgctgttgctgaccgcctgacaggcgcgccgggtaagcatcggccttggcggccaggccaacccgggccaacgcggcgtcggccagcgcacaagcctcggccttgttcatgcctttgcccagcaccaggggcgctgtgacgttttcacgcacggtcatgtgcggccacaggttgaactgctgaaagaccatagccaggggcttgcgcacctcgtcgatctggctttcgctgtcacggtcctttgcactgcggcccggaccgctgtagccaagcagctggccatcaatccagatttcgccctcgtcgtaagattcgaggaagttcatgcagcgcagcgcggtggtcttgcctgagcccgaggggccaatcagcgagacgatttcaccggcctgtaccgacagatcgaagccctgcagcacgcgattgctgccgtaggatttgccaacaccacgcatttggagaaggggaagattgctcattgcattagcctcgcaagtatcgagtggcgcgccggccaaggtattcggcggtcatggccacggccatggtcagcagccagtagctaagtaccagcagggcgtaaggcaggacgtaggagaaggttgtggagacgatgcgcccggcggccatggtcagctccggcacggtgatgatggaggtcaccgcgctttccttgatggtcagaatcacttggttacccaagagcggcagggcgaacgccagggcctgcggcgcctggatatgccagaaggtttgcccccgcgacaggccgtgcacccgcgctgactcgacctggcccgtcggcacgctgccccaggcagaacggaacagttcggcaaaataggcggcgctgtaaagccccagcgataggatgctggcctcaatggccgacagcctcagaccgatcaccggcaaaccaaagtagatcaccatcaactgcgccagaaacggcgtgccgcggattagccagatgtacagctggtacagcaggttgaacgccgacacagccaggcgcagggcattgagggcgaagcccactaccaagccaatggcagcccctgccaggctgacgcccagcgtgaccagcatcgcctcgccgaaggccggcagaagtttcagtagctcctccatcaggcgtgttccttccaacggtgttcaaggtattttccgagcagaaccagcaggctggtcagcgctaggtagaacactgccgataccagataaacctccagcgggcgataggtctgcgctaccagttgctggctgacccgcatcaggtcggtgattgagatcaccgagaccactgccgacaccttgatcacatcgatcagctcactgattagcgccggtgaggtcaggcgcagcacttgtggaatctggatatgcagcaaagtcttccacttgccgatggaaaacactgaggccgcctccagctgacccttggcgatccctgcaaagccgctgcgcagaatctgcgactgatacgccgctgagttcagcgccagcgccgccccggccgctacgagcggcgaaacatcgatgttcaacgccgacggcaggtagaaaagcagcatcagttgcgccagcaccggggtgccgcgaaagaaactgacgtagacgcgggcgaaagccctcccgaggtggctacggccgttacacagcagatggatcgcgacgccgattaagaaccccagcaccatgctcgccgcgcacaaccacagggtggtcagcgcgccgtccaaaagagcgggccagtacagcgccaggcgtgagctgaaatcggtcatggcggctactcagatagtcggaaccggcatggcgtcagagggcagctgcatgatgaaaccgaaccatttttcctgcagcgtttgcaacgtgccgtcggcgctggcctcggcgatgccttcgctgaacagctgtaccagcgaggcgctgtcagcgtccttacgccctacccagccgaaataggtggtcgggccgaccatttccggcagggtggcaaacagaccgggacgggatttcaccagcgggccgagactcgacagggactgggctacgccgtcgagccgcccggtggcgaggtccgcgtaggcctcatcgaaactgacatattccttgatgctcttcatacccggctgcccgccggccttgagtttggcatccagcgcctgaaggatagcgagctggccggagcctgtttgcgaccccaccaccttgccattcagatcgccgagctgctgaatgccgtcgtcgttggcgcgtttaagcaaggccacagttgattcggcgatgggcaccgtgaaagcaaactgctcgaagcgggcctggttgaccgttaccgaggtaaccacgaagtcgaatttgccggtatccagtccaggcaagataccctggaacggcagatccaactgacgcaccttgacgccgggcagcttggcatccagcacgtacttcatcagatccgcgccgtagcccaccactttgccgttctcgatactttcgaagggcgcgaagcgtgcctcggtggccaccacaatctggttcttgtccttgatgcgttgcagcaggtcgtctgcctgcgccatggaagcaaccagcagtgtggcgagggacagcgacatggctatgagcgggtggcgtttcatgatttagtctccagaggacattctttaacttcattcaagtaacttgaatgaagttacaagagcatgaaacgtgccaggcgcggaaatccgcgctgcattgggcttgacggtatttcttgcgcaaacattgtgcgaatgcggggcgcgccagccgaatgtgatccattggggtgcgatattggccactggctttcggctcggaggtaatgtcgataccgcgtgcgacgtgtgtggaatggcaagcactgtgcagtagctcgggccgagccagttcatgccttgtacccccgaagccacgtcgccgctggccggaaatcccgccatgagcgagacgctgaccaagtctatggccgaacggctggcacagcggtcctcggtagcctctggcagggctttgattgccgggcagcggaggctgcctatgccgtatgccggctagtcgctgaaaatctaggcgagccgtcggtctggtcagctgcgccgccatgcggaccatccatcgggcggccggtttctgtgcgttatgtcgcgcgctgggagtcgaaggcgaactcgctagcccgctgggccaggaactgtcagatacgccagacctaatcgagatcaactaccgccgacgcctggctgccgcgatcgaatgcgtgacacccgccaggaggaagacgctatggccggatttccgctggggttagctgacaagcagctcaaccgtgcactgcttctggttgagcctgtcctgcgaatggatgccccggagtggatgcggcaatcggctattggagatagatgatcactaagagtccgcagtgaccggctcgcatcccttcgtcgactcgctggccgcgttaccctggccggctcgacatgctgcggaactaaataagccttgcgggctggcgcctgactgccagtagcagctggatgggcatctgctgagctggttaggggcagtgtatatgtgtcggctgtggaaaattagaaaagccgctctactgatgtgacgctgttccgacagagcccacatcacggtccgcttttggccccgttagcggacagtggtttgcccgatctagatgaaccctagtcaggggttgtccggggcaagcagccggtcgtaccttttcccgagacgatgtcgagttgaagatggctttgttgggctgcgaagattctccaacccttacggacagctttagagcacgatctcatcgaaggcgcggatcaattctgcacgctagcgggcggaagcaatcgtacagaaggaatcgatggtgaatgatcgacccaaaaactggcgggaccgttcgagaccgttcctaatcatgcacggtcgagatcagagcaggcgggcgactccaaaaatatgaggtaaagcggagtcgccagtccggtcaggcgtcgtccatgtcctctatgcgaagctgcagttggtcacattgttcccacacgtctgccgtgacctcgcgcgaccgctgacccttcccacgaggttgcgagaagaatgccaggccaccttggagagaaacccggtcgcaagcttcgccgctatgtccaaccgctgccgtggggctgaagctgctgacagcttcagccaactgctcgcagattgcgtccctgctttcaaacgaatcgctggtcgcctgtagcatctcgtggatgattgctaggtcgacctgggtactcgtaaaccagtatgcggcgcaccggtacgccgctatccatgcaatgttcgaatcttggatcatggtatttatcgtcccgctcaagcactgcttctgcgtgcccgccgagaaacatgagccaagtacgacgccggtaatattggctttccgagaccccaagttacacttcaccaggatatctactaccttagcaccggagacgcggctgccgtcgccatggccggctacataaacgatcgcattatcgtactgatgagaggccagttcatcgaatgcggaccggaagctgtgcaggtcgtaatagcgcgaatgaacgatgtcgacatcgctgaactgcttggccatgccctcaaaaaatggcagtacggaagagcgatttctatcgctctcgtccaagttccaagggccttcaagaatcaataccgcgcttctgttgctcatgccaaatcctttaaaatttttgtgttcatgtttcgcgagtttgtatctccagcgcctggtgcagacgctgcgtgatgacatcccttaaagtttctggtttatcgatgcggatcgatcccgcatgcgacagaatccaccattgaagctcccaggtatcgagcacggtggcctgtagtttggcgccgcccttggtagccgaaagggtcatgtcgctggaaatcggcgtttcccgaaccagtcgcgctagaccgtcggataaccaagcctcaagtcttatcggcagggctttaccgaactgcatggcgccgccatcgatgtagcgctgcagattaaaattgttgggtcgattcgaaggcgtttctgtcgctcgtgcggcctcgaaccgatgtaggacgaaccgcctgatgtcatcgaagggttcggcgacggctattaggtaggtcacttgggcccgctgcaccaaagcaagcggggtaagcgtcaagtcgtacgtttggttcttgtgaaccgagtagtagcggcactcaagttgcgtatcgttcagcagggccgtctgtaccttttcgagaacatccggatccacttgaggcgggatcagcgcaagcgcgggcgggacgctggcgaccttttccgcccagcgggcggtggcgttatcgtcgcacaaagcttcaagcttcttcctagcctgggcaaatttcggctctagcgcggcgagcaggttctgcggaacgagcggacgaatgctgccttcgaccagacgcatcgtgagagcgtcggaaatcgacaggcccggcaactctgctgaggagccgggtgtccagtaccagccgaatggcgttcccttggtattgcattgaagtggattctggagagttccacaaggtcacgctcgacggtgcgcttgctgcttgcatggccggcttgttcgagtcgacgctgtagttcactggccgttgcaccgggcgacctgacgggcaacagcttcagaagctcccactggcgcgccagggtcgatcgggtagagcttgctggcacgagttcgatcctccttgtctcaagatgtagccgttatggagttttagcctgatgatcatgcctcatatgacgctttgggcagcggtctcaccgggccaattagtgcacgaagccgatcgggcgcacggaggcgtaacccttcgatgctgcttcagcaataatcgcctcaatgacctccgtggcggttctaaaaggcttgaatcgggatcgtcgtgaaatggcgtcaaagtcgccaggggtgacgtgccgttgacgcaacaggcgtccaagcgcgagcgtagcggggcgtttcagatccatcgccgtcagatgcttatccagcaggaccgagatctggtcggccttcaggaaaccgaaatggaccttgagatcgaagcgccgcaacgaagcctggtctaggttctccatcagattggtcgacgcgataaacaggccacgataggcctccatctgcgtgagcatttcgttcactgcgctaacctcccagctgtgctgagtccgccgccggtcctgaagaaggtgtcgacttcatctaggagcagcacagcgtcatctttggcagctgcctcgaaagcggccgccaagttgcgctctgtcattccgatgtaaggcgaaataaggtcggatgcccggcggctatataatggccgccccagctgccttgcgacccacagtccgaatgcggttttccccgtcccagatggaccgtagaagcacagtcgggcgtcttggtgatggcgaaggccgttgactagctcctcgagcgaatggtcggcattgaccagatcggggctgtagaaggcgggcaaggcttcgcatcggttggtcaacagcatcggaaaaccctgggctgccagcgtggcgtcaactaggtgtcccaccgaagtgctgatatccggtgccgccttctcaatggtgcccgcaaccgcgatggctcgcgtgatgactgcaggggtcagttgcacatgctcggcgagacgcgctgcgagctgttcgtttacccgtccgccactaatctcatgaacgagctgtaatcgctgcgcccttggcggattgtcgagcttcagcacaaggtcgaagcggcgaacataggcgttgtcgagagcgtcaatattgtttgttagccagaagcagggaagcggattctcttcaagcatccggttcgtccagcccttgtgcctcgggcgatcttcgaacaggcccgatagaccacccgttgcgccgaacatatcttcaatctcatccatcaccagcagcgcccggcgtttggaaagtacgcacatggccgagcgcagcgcacaaagccggccgaagccgtcaacggggtcgccatcctcatcggtgcagctgatctcgaatagttctgcgccaagatctttggctaacaggccggtcagttcgcttttgccagttcccggcggtccgtacagcagtacgttcaccccggtgcgtctgtcggccattgccgtccgcagatattcgccgctcatgctcagcagggggccgagatgccgatagtcgccgcgctgcattgtcccagcaggtgccgctcggaaagcgttcgagaacagtccaatggggtcgcctcggtaatgcaaaagctgaaacgccagatccatgtttctcggttgcaggaggtcttcgagatcggaatggcgcatacgacggctgaacgactcaatcaaccctgcctgggccagtgcgcccgacagggagaggcgcttgcgaatcatttgctgcgggcgcgccaagaggttggcaagaatcctcaacattttgttgaagctgacggagcccacatagccgcaacattcataaagcatcgtgtcggttgcaagcatggtactgagcccaagaatctcgcgttccagttcatcaagcccaaccagctcgcccagtcgctccacgttgctgagcagtggctccggaagcgtcggcttgggggtccgcttgttgaactcggtctgctggattcgaagtgcacgtaatacttgctgcaaaaagttcaggccagggggcctattcccctgtcgtgcccggcggctggcgggagacggaatggctgccgaattattcaggtcggctgcgtcggtcagccagagcacgccgagcgcccgcgcgacgtcggtatctgcgaagctttcacccaccacaaacttggcgcaccctcccatgtcgagcaatagggcatacatccaacgcacggcaatgggtgttgcttccaagtctcgctcaacggtgtttgcatcttcaaagctcgacatccccgactcctgtcatgaatgaaggcatggtgatatcaacgtgcgacgcaatacgtcgcgcttcgtctgctcagaaacccttgagccgtatgattttccgggaatgtgcgatttccacgagccagcggatcagctccgaataattgatctcatcatccgaaaccagtccttttcgagcctcttccaggctgcttagaagggcgagcgcagccggattctcggtattgaccgtttggctcgaacgcatgagcgtcatgaccggatcgagcattgcatcgaacgcgtcctgccgcacctggagccgggacaagtaggagagctgctttcgaatgggatccggcgtttcgctcgatccgaggaaaccagcaagactgataattcgtcttccaagtcgcttgctgcttgaattttcttgaagtagcgcttcgaggtgttccttgatcagctggtccatacgagtactcctgtgtcggggtgaggaggttgcatggcagtcgcgacagcatgtgtcgtgctcggtaaggagtggtggttaaggccagccgcagattgttttcatgacgtgctttccgcagccactgcgttcaatccctgaacgcctcccgaaagcccatccagagcagcagccaactgtcagtggttgatttgcggccggaaagcgcagtgcggcggaacacaaactgccaattatcaggatggaggttggcgccggtacgaaccaccctcatacgtaccggtttgcagtcgccccagggtgcgcgccaccgtgctggctggccaggcgacgtgatctctatctgcagcaccggcgaaaggtctcgctgacgtctgcggtcgaggtgctcggcatgaccacgaagcatgaggctttttcgatgcagcctaatgtactcgtctgggtcttcaggttcgcctgaatccggagccaagagggccgtcagcgcatcctcgatgtgcagcctgtcttcttcaagttcatccagttgatgctggtcgggccattctcgctcccgcttcccataagggttgattaatagccatgaggtgaacactgctctgcagtctgcttcaagctctctaaaaccgctcaccgtaaactcaaccataaaacctgtacgatcagacaagcgaacccgaaaccggatcggttctcgggcaggcacactcacgcttgtttcgtttataactccggtctgcggtctaaagtcgtttatccactggatacgctgctgacgcagcaaaaagcggttgttatagataaatagggccaactcaatagcttgccttcgcgtgcaggcaagcctcgttgctgccacgtcttcttccgttgtgatcgtgcctgaataatcttcgtgttccgcaataaaaaggtcgggcagattggcgcctgcactaattgcttggttgattagatatctcgcccattcagtgctgatctccccagcaagagatacgtagagcgatgccgggctaccatatggcccgtcgagttgatacccgtcacacgaagaatgggtaaaacaacctacagcagacagtgctttgacgagcagtgcgacatgagaatctagaccggcaatgggaattttgagcccataaggtcgttcccggaaaacatccggatcgtctgctccgtctggatacagcgggcgactcggaacgtgctggtaggtaaaaagcgaagatagcttctgctcgtttaacacttgctctggttgactgagcctgaacggacgagccgactcgcctgttctaattaacgtgcccagacggagtcgtcggagcgttgctgtaaggaagccccaatcgtcatgacagcgccagttatagctgtatttgctttgtgataggcacgcgttgtcggtcaggtagatctcctcatcaaccagatccacgagaaaaccccgggccaggagggcggtagagagcttcattggtcggttaaacaatggctcatctgtttcagttacgttgggattcacaagaatttccgcttcgcgcctgtgagtttggccttggccgcaaacaatgcggcagcgctgcgacagcttgcgtcgtggctgaagctcttaaggaaactctgaagaagacttcctgattttggcaaaatccccggactccactcaccgagttttccgatgaagcagatgaccttcgccgatgccgagtacgccggcaagcgcaagcagacccgcaaagagctgttcctgatcgagatggatcgggtggtgccctggaaggggctgatagccctgatcgaaccgcactaccccaagggtgaaggcggccgtccggcctatccgctgatggcgatgctgcgggtgcatctgctgcagaactggtttggctacagcgatccggcgatggaagaggcgctgtacgagaccactatcctgcgccagttcgctgggctgaacctggagcgtatccccgacgaaaccaccatcctgaacttccgtcgcctgctggagaaacacgaactggctgccggcatcctggccgtgatcaatggctacctgggcgaccgaggtttgtcgctgcgccaaggcaccatcgtcgatgccacgctgatcaatgcgccgagttcgaccaagaataaagacggcaaacgcgacccggaaatgcaccagaccaagaagggtaaccagtactacttcggcatgaaggcgcacatcggcgtggatgacgagtcgggtttggtgcacagcgtagtaggcactgccgccaacgtggcggacgttaaccaccgtcaccgaaccagggaagggctctggccgatcctcccctgcagcccagatgagcgagggtgatacccgcaagaatgtaaatgtgttcttccatcctgaggggctaaggacttcggcatcccagatcgccttaccggcaggattggcaatgatcaggccgttgtcctgaaaaacattaaatagggtcgaattgcgttcaggcacgccttcgataccctggctcagaaggtgagcccgcagtcgatccgatactgtcttgcttaccagccatactgcgtctggagtaaaccagccatcggaagcctgaggctgattcagttttaactcgttcttgaccaagtatctcaggccgtcgaggagctgccgttggagggtgttacgaggcgctgctacagctctatctgggttgcctccgagctcgttggccacggatgcctgatctgacctcgtaacaatgtcccccagcaccccggcgtgctcaaactggccagccaagacgtatagaagcgaagcccaaagttccggatattgagacaaccagttcatcacctcggaagggatcactcgcgtgtacaacaagccggccgcagcgccgtggagcttgtactggcgtcctttcacatagtggaagcgataatcttcagtgatcggtccatcccatgctcgccaggttttaccgctgcgcagctggacgttaacgtctaccgccactttcccgatatcgtggagaagagctgcaaaaacaacacccgctgaccaagcctctgactgtgctgactggatctctggcgtgcttcctactggtaacaccagcgactgccgcatcttcaatgcatacccggtactgcactgcgacgaaacccgcttacaggtgctgcacgaaccgggacgcgatcccactgcgcaatcgtggatgtgggtgcaaaccggtggcccgcctgacaagccggtgatcctcttcgactactcgaccagccgcgcgcaggacgtcccgttgcgcctgctcgatggctatcggggctacctgatgaccgacgattacgccggctacaacgccgtggccgcaaaagatggcgtcgagcgcttggcttgctgggcgcatgcccggcgcaagttcgtcgacgcacagaaggtacagcccaagggcaagaccggacgtgccgacatggcactgaacctgatcaacaaactctacggcatcgagcgtgacctgaaagaggccagtgaaaccgagcgcttcgaggcacgccagcaacgcagccagccgatcctcgaacaactcaaagcctggctggacaaaacccagccgcaggtcgctgggcaaactgctttaggcaaggcggtgaactacttggccagcaattggagccggctcgtacgctacgtcgaaggcggacagttgcccatcgacaacaaccgcgccgagaacgccatccgcccgttcgtcattggccgcaagaactggcagcgacacgcccaaaggcgcgacggcgagcgcgcagatctacagcctgatcgaaaccgccaaagccaaccggcaagaaccttatgcctggctgcgctacgtcctcgaacgcctgccaacggcacagcgcgtagaagactacgaggcgctgctgccgtggaactgctcgccagccactgcatcctgaacgagatgcctcaccaacggtaggtggggtttatggagcgcttacccaatgtccaagcagtcatgcggaaggctgctatccattctgtgtacctactactcgcctgatctccgaatggagagcagatggtcgcatggcctgctaggcattactccgccatgatctgcctgtggcggcaggcactaaagcctcttatggcaggcaaataacggcgatgttattgtgcaattacttattctcactctacaacggcgagaacaattcggggcccagcctcgttactctgcggtgattccccaaagcagtggaccggaaagcaaccgaatgcgaaattctcggaacaagcatcctcacgtcgcgatggtggcggagtagacaagatcaggggctaaatgaaaaccgcttggaaatgctgggtaagtgaaatccgtttcacttgggcgttggtattcctgctgatctgtatacccgctttgctttacggaactacgatatcctcaatgattatgctgatcggtgtcgtcctgttgggggtacccactgctctgctaggctttatcatcataaaagataaatcatggtgtttccgcctggcccggcgcatggccgtaatggtggcggttccagccctgactttgggagtgatcctaaataccgacaggcttaccccggttatggcctcgcctatagccaaagcgatcgaatccttcaagcaggaaaatgggagctatccgaaaacccttgcatcgctcagcccaacgtatctgccaagcctaccagcagtgcgggcttcggttattcagcctgaggttatctaccgcctggacggtggtcgtccgtatttagtggtgccctcagccgccggggacgccttctcaaaatacgaatacagctttgaagctcgacgctgggttcacttcgattgaattactgctgaatcttattagggttcaatggctgcttctggccgaatccaggccttcgcgacaggcagctatcggccgattctgttgaaaaagtagcggcctccccatgcccttggcaaaattgctttgtcagcgagtgtgggggcgaacagcatgatgggacagttaccgggaggacagcagcgcctgttctactcgttcaatctggaagatcacgtcccggcccaacatctcctgcgaagcatcgaccagtgcctggatctcagtgatctgcgtgcctatctggcggatttctatagccccatcgggcgcccctcgattgacccggagttgatggtgcgcatgctggtcgtcggctactgctatggcattcgttccgagcggcgattgtgcgaagaggtgcacctgaacctggcctatcgctggttctgccggctgggtctggaagacgaagtacccaatcactcgaccttctcgaagaatcgccatgggcgttttcgtgacagcgatctattccgctggttattcaatgaggtgctgcggcgctgcatggcagccggcctagtcaagggtgaaggtttcgccgtcgacgccagcatcattaaggcggatgccagccggcaacgtggggtggcgggagatcaggtcgattggaacgacccaaagctcagcagccgagcagtgcgtgagtacctcgaagcccttgatgaagaggcgctggctgaggctcttcccaagaaaatttcgctcacagatcctcagtcccgttggacagcagcgccaggtggcccggccttttttgcctactccacgaattacctgatcgacactgagcacggtgtgatcatggacgtggaagctaccccggcgcaccgtaccgccgaagtcgactcgaccaggacgatggtcgagcgtgtcgaagcgcatttcgatctcacgccggaacgccttatcggcgataccgcttatggcaccgccccgatgctggcctggatggtagaagaaaaggacatcgagccgcatgtgccggtgtgggacaagaccgagcgcaaggacgacagcctctccagtaacgacttccactggaatcaggaagccaatgaatatcgctgcccagccggcaaaccgctacgcagtgaatggcgtgccttcactcagcaaagatcgcgggtaaccaaggccaacaccatcatttaccgctccagccaaaccgactgcgccacctgctcgttgaaagcgaaatgctgccccaacacgccgaatcggaagatcgtccgcagcatccatgagtcttcccgcgacgtggctcgacgcatcgccaagacaccggaatacctcgtctctcgctgcgaacgaaagaaggtggaaatgcttttcgcccacctcaaacggatcatgaaactcgaccgtttacgactgcgtggcctaacgggtgccactgacgaattcaccttagctgcgatggtgcagaacctgcgccgcatggccaagcttttgcctcaagggccaccgctgacgggataggtacgcctgctacgagcagaaaccctcaaattaacccttaaaccggagcaaggacgctcagtgaaacgccggaaggcaacttgaagtggcttgcagccatttcgacagcagcacacttgatcggcaggctgccgctgaagcttactttttcaacagaatcggccagaagcagccgtaagcataagagctacaggtgcttctaaagcccgaaacaagaccagaaaccatagcggcaccggacggatcagacgttcagcctgacctctccaactccagtcagaccgaaagtgatcgtctgccccggatcagcccagtaaataccagtccaactgcctgtagcaataaggtcgccggcgcgcaacggcgtgccttgcgctgcagcatgtcgcgctagccacggtagagacgacagtggatcgataaaaggatgcgagccgttagcgttgactacttcgtggctatcaacccatagtttcgtggtttggtgtgaccaatttggcagatccaatagctgtacggcaacgccaagaatgagagcccggttgagctgttggtcggcaagtcgaagcaacggatcggcatctattccgccttccagacgtgtgtcgcagagttcaatcgctggtaaccacgcatcaatcgcgaagcggatttcggtcagatcaggggcgtcgggaagatcccgccctagacggacaacgagctcaccctcgataccgagcgcggtgacgtaaccgggcggtacgtgccagcctgatcgatggatcgcagtagcctggaccgccgccgcgctgatcatgccgccaggggagcccccaagtttccaggcggccggacgcgcgccgtcgaaccaacctagggcatgaccgacccggcgttgtacagcgtaggccgcggcggtgtcgggcagagccagcccgctgagaggctggcgctggcccgtgcgccaggcggttatcaagcgcttggcaacggcgtcgatgtgagcctcgctcacatcgggatctcggtctgccggcggcgcggcttggccggctcgggccgggcacagggcaggaactgaccacggcctgcgtcgccgcgtggctgttcgccgtcccatacgacgtcaccccgggacagcgtcatcgctggccaggcgctcagatgcatgccggcataaggggtgtagtccacattgtggtgcaggcggtcattgtccagatggaaggtctgcccttcgtcccagatcaccaggtccgcatccgaaccgatggcaatgctgcccttgcgcggataaagaccgtagagcttggcggcgttggtcgatgtgagggcgacgaagctttggggcgtgattcgcccggtacgtacgccctcggaccagagcagggccatgcgcgtctcgactccgggaatgccgttggcgacctggtcgaacgacacttgctcgccatgcgctttcttgccgcccgggccgtcgtagcggaacggcgcgtggtccgaggagaacacctcgaacgagccgttctccagcccgtcccagatgacctgctggttggccttgtcccgtggtggcgggctgcagatgcacttggcaccctcgaagctgtcgtcgcaacccaacgagtcggcggtgaggaacagatactgcgggcaggtctcggcgtaaaccttgaggccgttgctttgcgcccagcgaatctgttcgacagcctcgcggccggaaacgtggacgatcaggatcggtacgttcaccagttccgccagagcaatggcgcgatgggtcgcttcgcgctccaccagcatcggtctcgacgtggcgtggtagcggggcgccgtgtgcccggcggcaagcagacgctcggtgagccaggcgatgcagtcggcgttctcggcatgcagcatcaccatcgcgccctcacggcgagcgaccgacaaggtgtcgaggatttcacggtcgctgagcttgagtgcgtcgtaagtcatgtagatcttgaacgaggtgtagccctcggcaatcagggccggcagttggtcgcgaaggacctcgggtgtcgggtcggtgacgatcaggtggaaggcatagtcgatcaccggcttctccccagcacggccgtgatagtcctccacggcggcgcgcaggctcttgcccttttcctgacaggcgaacggaatcaccgttgtggttccgccgcaggctgccgaaacggtgccgctgagaaagtcatcggccatgaccgagccatcaccagtgggctggtcaagatgtacatggctgtcgatgccaccgggtgtgacgtgacgcccttttgcatcgatttcgcgggcaccggccggcaggtcgaagcccagcgcggcgatgcgcccgtcacggatgccgatgtcgctggtgaaggtgtccgcggcagtgaccacgcgggcgttacgaatgacggtatcgaatggttgcatgtcaggcttcctgaagtagccggccccagccggtgatgcgacgggtatccacgccagcgcggcgcagcatgtcccacaccacggtggtcacggtgtcgaacaccgggacgccgtgttcggcttcccagtgggcgacccggtgagcggcatagagattggtgcaaaaggtggtgattgcctgcgcgccggccgcgaccacgtccgcgacctggcggtccagcgtggcgtcatcgaccagggcgaaggcgaagttttcctggatccccagatgactttcggtgcgggcgtcgatgccgaccttggcgtagttggcgatgatcctgctttgcacgtcggcaaggtacggggaaaccagccccagccgcctgatgccgaaagcctcgagcgctttgttcaacgcgaggacggatgtgctggcgggcacgccggtggcctcggtgatggccgcgcagagcgcttcatcctgatcgaaccccagccagccggcggaggtgccgctccagccgatcgcatcgacatgggcgtcggcgagcagcttcgcggcatccaagatgcgtgtctgctggaactgcccgagcgcgtcggggctgagggcgatctgggtcacggaaaaccgcgcgaaatgcacgctgacttccggcaggccggagaccagccgctgggtcagcggctcgagcgaggtatttgaagagggcgtgaggatgcccaggcggatacgttggctcatcggggagttccagcaacggacggatagggacggagcggcttcgggcagcgctgccacagggcctgacagacgcggtcggcctcggcgcgtattgcagcctcgtcgacacgggtggcgcggccctggtcgatgaccagctcgccgttgacaagaacgctttccacgtcggcagcggtggcgttgtggatcaggctgcccagcgggtcgatgcagggcgtgaggtgcagctgacgaaaatcgaggatggcgaggtcggcgagcatgcccacggcgaccaggccaaggcgatccgcccagcccagggcggtggcgccgttgccggtgcccatggcgaaaacgtcacgaggctgccagtcgtccgccacgaagccggcttgcagacggccgatggccagggtccagcgcatcacctcgatcatgtcgccgtgcatggtgtcggtggcgaggcagatcggcgcgccggcatcaatcagacggcgggtcggcgcgatccgcccggacattgcattgcccaccgggatatgtaccacgtgcgcgccgctgcggccgagccgcgcgatatctgcctcgtcgacgtgaatgcagtggccagccagcaggcggtcgttcaacaggcccagctcgtccagcagctccacgggggaacggtcgtgccgtgcgcgaacccagtccacctcgtcctgactctgcgcgaggtgggtgctgatgggtagatcgtaccgctcggcgagggcagcaatctcccgcaggaactcgaccgaacaggtatccggtgcgtgggcggtcaggtgtgcctggatacggccatcggcccgcccagcccagcgttcgacgaacgcggcggcgcgctccaattgccgctcgccacgggcgcgatcgaagcgacggtcgccttccagcaccgaggcgaaatcgacatccgccaggcgctggctggcgaacaggcgcacaccggtttctgccatgccggcaacggtagcttcggcgtggacgaaactgtccaccaacgtggtgcagccggcgcgcagcgcttccagcgcaccgaggcgcgacagggcgagtgcttcgtcctcgttcagccaggacgcctggggcaggcccggcgtgtaggacggggcaaaaccgcaatcgggcgccacaccccggacgaaattcaggccagcgtggtaatgggtgttgacgaagccaggggtgacgacccggctgggcaaggcgagggtccgagccgctgccgggcgttcgtcgccgatgaaggctatctgcttgccacggatacccagattggtcgtgcgcgcgacgccgccagccagcagcaatgtcgcatcggtgatcagcaggtcgagcatgtcgtcggtcatcaggcagccatccatccgccgtccaccatcagggtggtgccggtcatgaaagtcgagtggtcactggcgaggaacagcacagccaaagcgatatcttcagggcgccccaggcgtggccagggagtgcggctggacgcacgagcaagcacgtccgaggccaccgcacggccgcccgcacctgtctggatcttgcccggcgccacggcattgcagaccacgaggtcggccgcgtagtccgtggcgatctgccgggtcatgtagtcgatcgccgccttggtggtgccgtagcccaggtctccgggcgcggcgatcaggccgtgctgggacgacaggttgataagccggccgcgcacctcattgacggggggctgctccaccatttgacgcacggcggcgcggcagcagcggtagacgccggtcaggttgacgtccagcaggcgctgccagtcggcttcgtcgagctccagcagcggccgtgcatggcgaatgcaggcattgttgatcagcacgtccaggcggccgaaacgtgccacggtctgcgccacgagcgcgtcgacctgagcggtatcggcgacatcggtgcggaagaaggtggcgctgttgccgtcgcgggcgatgagctcggctgtcggatcgccaccttcgatgacttcggtcgtcacgtcggcgatcaccacgtcggcgccattggcagccagctgccgggcaatggcacggccaatgccggaggctgcgccggtgacgatgcagaccttgccgctcatgtcgaagcgggcggagggaaacgggatgtgctcagtcatggtgtgctctagcgccggatagatcggtgccgtgctccctgatccaatggtggtagtccgcttccgcctcggtcagcccgaagcggggccggaaggtgctgtcgccaaggagccgctggatcgacatggaggcgcggtcgtagtcagcgaaatagtcaatgttggcccgttcgcccgattcggccaggcgccagctgaagtccggatagcgagccgcgatgcaggcgcaccagtcggccaggctccattcgaatccggccgccaggttgtagagcggataggcccagcttggttgatccagcagcgtggccatggcagccgctacgtcgcgtacgtacagccagtcgcgtcggccagcacggggaaggatggccgtttcgccgtctcgggtgcgtaccagaacctgcagtggcggactcagtgtgtcccgtacgccggtgtccgcctcccaagggccgaagcaggtgcccagacggccaaccaccagtggcaggcctcgtatggacgccagccgcatggcggcctcttcggcggcacgcttggacatgccgtagaggccttccggcaacagcggggtgtcgtcttcgcgtagcgccaccggcgaacgcccgcttcgtccgtatacggaaccggagctggcatgcagtacacgctcgacccccgtatcggcggccgcgttgagtgcagcaagcacaccgccgacgttgacctcgaagatcgtctgcgcggcatgccgctcgcgcgcctcgtcggcggtgatcgcggccagcgtaacgacgcgctgcgggcggtgctggctcatctcggcacgcagtgcatcgacgtcccgtacgtcaccgatggtggacacgaaccgaccgggtaacgctgcgaacgcgcggttggcggcttcggtcggcggtgaacgatcgaaaccgattaccgtctcgcccgtcgctatcaggtgctcggcgagcgcaaggcctacgaagccactgcttccagtgatcagcgtggtcatctcaggccgattccttcaccgtttccgggcgcaacaacgagaggatgtggcgtttgtagtcgttgaacgcggcgctggtcgggtcgcgtggccgctccagctcgatgggcagaagctcgcggattcgtcccggccgagccgacatcacggcgacgtgggtgcccagcgccagtgactcatcgatgccgtgggtgacgaacacgatggtgctctggctttcgcgccagatgcggatcagctcaccgtgcatgtccatcttggtctgctcatccagcgcaccgaacggctcgtccatcaggatcacttccggattcatcaatagcgcacgggcgataccgacgcgctggttcatgccgccggaaagctcgctcgggaagtgattctcgaagcctctcaggcccaccatttcgatgtagcgctgagccttttcgcgccggtcggccttgctggcgccgcgcatcttcaggtggaaggcgacgttttcccagacggacagccatggcatcaggttggcctgctggaacacgacgcctcggtcggctcccggctcggtgatgacctgaccgccaacggtgacggtaccggacgacggcttgtcgaagccagcgatcatgttgagcagggtggacttgccgcagccgctcggaccgagcaagcagaggaactcgttgcgcttgacctgaatgctgacgttatccaacgcggtgacgacctgcttgcgctggctgtcttcgaacacgcgggacacgttgtcgatggtaatcagagccatggtcttcatccttccttcgcttgcagggtggagccgcgctgccagcgcaggacacgaccggcgatgtacttgattacgtagtcgctgaggaaaccgagcaggccgatgctcaccatcgaggcgatgacgatgtcgtagcgcaggaagtagtacgaatcccacagaacatagccgaccccacttttcaccgcgaccatttcggccgtcacggtgagcatccaggccgagccgatggcgatgcgcagaccggagaagatgctcggcaaggcggcagggaacacgatgtggcgcagcagcttcgacggcgtgccgccagtcatggcgccggcgcgcagcaggttgcggtcgcaggtcttcacgccgtgaatggtgctgagcaataccgggaagaacgagcccatgaacaccaggaagatggcaggcttgtcggcgatgccgaaccagatgatcgccagcgggatccaggacaccggtgggatcggtcgcagcgtctgcagcgtcggctcgatcagcgcttcgacctggcgcgaccagccgatggccatgccgatgccgacgcccagtaccgttgcgatcagaaacccggcgaacacccggccggaactcgccgcaatatcggacagccagcgcccggaatagctctgggtgttgccgtccgtggagaagatccagtccgcccaggccagcatgacctgggacggggccggcaacagcgcgggcggcaggatgcctgagcgggagaaggtctcccagccggcgaggagcaggaccggcactatgaagcgctcgatccttttatagaggcgttgcgagagtgaagaagacatcacgggtcctgaatcaatagccgaggtcggtcttggacttgccggtcactttttccaagaagctgtagtcgaggttcttctcgaccgcctcggtgacgtccgtgttgatgtacttcaggtcgcgcatcatctcggcgatggccacggcggactcgcggtacatcctgtagtcgggatacaggttgtcgaccgcgccggtggcgatggcattgtcgaggcctgtgaccttctgaatggtgtcgacgaagagcggtttgtcgtcggccatcatctcgttgaccttaacgatggcgcgtacggcctcctcaacgcctttcgggttgttcttgatcacgtccgagcgggtgacgatcaggttggtcagttttccagcggcctgctcatatggaaaatcgaagaatttggcggccttcacttcccggatttgggtggcgaacggatcgaccgacgtgatcagctcgacttcgcctcggcgcagcgcctgtacatggtcggacgggttggggatattgatgaactgcacatccttgttgatatcgatgccatgggtcaggaacgcgcctcgcatatggatgtcctgcgcattgccacgggaagccgcgacccggaagggcttgccttcgtctttgtattgcgcgatcacgcgcttcaggccttcccagtcacccggctcgacggccaggtcgttgcccacgagaatctgggacccgccattgatctggccagaaatccccacgatgtcgaagcccttgtcgagtgcggtggcgtagtgcagataggtgacctgcgctacatcaatgcttttggaaagcagggccgtgagcacgtcgttgccggtgttgaaagagatagcgtctagtttcacgcccgtggtgttttgcggagtgagcgacagcggcgtgcagtgggcgcacttggcgtagcccagcttgatcggttcggcttcctgcgcttggctcagagcaggggacagggcggcagtaaacatcaatggcgccagcagggcgccggcagcgcgcttgagtacagcataggacgagcggatgggtcgcatgtcgaggctccgtgattgtcacaaaaattatgtctcgttgtggcaaaacgtttgcaaccgccatgccaccattgtggaaacttccgggtcaggcttggcacggaccattcgcgatcttgctgcagcgccggtattcagggcattgcggcacgtcgatatatgttctcgaccgctgcgatctggctggctgggagacgtacatgtgaggtgaagcgctgacacctcatgcgcgatgaaggtgcaagttgcagagaaatgttctccagcggtgcaagtttgcacaattactcaattttttgtgacaatcctcttcgccgatgtaacaggcgaagggcaggtgcaaggaatcgatgtgttgaccgagaaagaaccttcacgctcgcgcaaagcgcgcagcgccggacagatactgggaacgaatgacaaactggacgcaatatacgagcgaatcctggctgccgtgatggagcaccgcctgattcccggaaccaagctagtcgaggagaagctcgccagcgtgttccacgtgaatcggacccggatccgcgaggtgctgtcccggctggcctatgaaggggtggtgaccaccattccgaaccgtggcgcctttgttgccagcccgtcggtggaagaggcccggcacatctttcaggcgcgccgaatcatggagccagcgctgattcgcagcctggtagacaagggcaccgacgaggacttccagaagctgcatgcacatgtcgccgaagagcgcgacgccagggagcgcggtgacaagcgcgcagtgatcagactatctggagagttccacttgctgatcgccgaaatggtcgccagcccaccgctgatcaaactgatgcgtgaactgtcatcgttgacttgcctgatcatcctgctctacgactcgcccaacgtcccggcctgcccgaaccatgagcacaccgacatcatcgcggcgatggaagaaggcaatattgagaaagccattgcgctgatgatcggacacctcgatcacatcgaggccacgctagatctttcgctgcccgaggacaccgaagtggacctcgaagcgatattcggttgagccggtgagcacgccaagcgcattgaaactggcggcgcgggtccgctccggcgagactcgcgccgtcgcgattgccgagcgccaactggcgcggatcgctgcgttgaatccgtcacttaacgcacttgtgcaagtggatgccacagacgtacggctccaagcagcgcttatcgacgcgcgctgcgccgctggtgaagatctgcggcttgccggcgttccggtcactatcaaggataatctgtggctgcaagggcagatcagcacctgtgggtcctggctctaccgcaaccaccgtgcgccgcgtgacagctgggccgttgcccgcctgcggcaggccggcgccctgctggtgggcgtgagcaactgttcggaattcgcctgcaagggggtgaccgacaaccgcgtatatggcgcgacctgcaacccttgggacctgaaccgcacgcctggcggctcatccggtggcgccgccgcagcagtggccgccggactgggaatgttagccctggccaccgacgccggtggctcctcgcgtcggcccgcggcgcactgcggtgtcgtgggtttcaaaccgagcgctggccggatcgccgatccctggggctttcccgtcatcgggcgcgaactgaatgtgatcgcccaattggggcgacgtgtcaccgacgtctcactgatgctcgacgtgctcaccggcgtgcactcggcggaccgctactccacgcccatgccaacggtggcggcccgcccgctcgagaccttgcgcatcggttacagtctcgaccttgggctgggctataccgtcgatgcggatgttgccgcgctgttcgagcagacggtgagtcgattgcaatcggccggcctgcaggtacggccgttcacgccccgctggccgcaggggttgctcgccgcccctctgttggaaacgcagcatgcggaactcgccgcgcatttcggtgaggcttaccgcgccgatccgacccgcttcgatccggccatcgccgagcagatcgaagccggcttcgcggtacctgcgacgcggatggtggcgttggccgcgctgcgggacgccatcgtccgcaacacggcgaccctattcgaaacggtggacctgctgttgtgcccgaccgtcccggtcgagccctggtcactagatgtgctcgggcctccgaccattggcggccggccgaccggcccgcgtgatcatgcggtcttcactccgctcttcaaccaggctggcgttccggccctttcggtcccctgtgggtttggcgcgcagggattgccgctggggttgcagatcgtagggccacgctttcacgatgacgacgtgctccgcctgggagcgttcgtcgaggacacactagccctggaaatggcacccctcggcttctcccagatgcccgacacgttggagcaggcatgaaactgttgatcgtcaatccgaacatttcccggagcgtcacagatctgatcgaggcggaagcccggcgcgtagcggcccccgacacggtgattacgatggctacggccgctgccggcgtggcctacatcgagacgcgcttcgaagccctactaggggcgcacgccgtggccaccatcgccggtgagcggcttggcgaatacgatgccttgctcgtcgcggcctttggcgatccaggcctgcaggcgctgaaggaggcgctggacgtacccgtcgtcgggatgaccgaggcggccctgatgacggcggcccagcttggccagcgcatcggcatcatcgccatctcccaccgcatcaccgcgtggtaccgcgagtgcgtcgaccagtacgggctgttgtcacgcctggcatgcatccgccacctgaacgatcccctaagcgatccagggaccgtccaagtcgaccatgccgcccgtttgctagaactctgcaggcaggcagtctcggaggacggtgcagacgtgctgatcctagcgggcgcgcccctggcgggtttggcacgtagtctggtcggccagttgccggttcctgtcgtagatggggtatcgagcggggtctgccaagctgaattactcgtgcggttgaagcctggcattgctaggcaagggagcttcgcgcgccagccgattaaggataatgctggcctgcaatcggcgatcgttaccttattgaactatcagaacgcctgatctgggctgtggttcgcttcccttgaagagctgctggtcacgaccggccagaagcggccggcggcttcgtaaataaatctgcccccttttcgggttcatgaagtccaggcgtgcctggacttcgtcattgatcactccgcctaactggtcgtactggccgtgggttgcccacgtcaggaacttatcggacggctcatccaggccgatggccgagcgcgaggggtggggcactgcgtgggcgcctccatcgatttttctccggcaaggtcaggcgagcggcgagatggatggaccgcatggctacgccgcatgtgcactgaaccccggcgcctggccaagcgctacgctaaagatgcggtgtgactggtgcctatcctgtattggcagtttcggtaatgctggagctcgacgggcatcggctaagaaaattcgttgtcgtcgaaagggggcgcttctgggcggttacgactgttcttggaaggcggctatcggcttatagctgcctttcgcgaaggtaaggtaacggccgattctgttgaaaaagtagcggcctccccatgcccttggcaaaattgctttgtcagcgagtgtgggggcgaacagcatgatgggacagttaccgggaggacagcagcgcctgttctactcgttcaatctggaagatcacgtcccggcccaacatctcctgcgaagcatcgaccagtgcctggatctcagtgatctgcgtgcctatctggcggatttctatagccccatcgggcgcccctcgattgacccggagttgatggtgcgcatgctggtcgtcggctactgctatggcattcgttccgagcggcgattgtgcgaagaggtgcacctgaacctggcctatcgctggttctgccggctgggtctggaagacgaagtacccaatcactcgaccttctcgaagaatcgccatgggcgttttcgtgacagcgatctattccgctggttattcaatgaggtgctgcggcgctgcatggcagccggcctagtcaagggtgaaggtttcgccgtcgacgccagcatcattaaggcggatgccagccggcaacgtggggtggcgggagatcaggtcgattggaacgacccaaagctcagcagccgagcagtgcgtgagtacctcgaagcccttgatgaagaggcgctggctgaggctcttcccaagaaaatttcgctcacagatcctcagtcccgttggacagcagcgccaggtggcccggccttttttgcctactccacgaattacctgatcgacactgagcacggtgtgatcatggacgtggaagctaccccggcgcaccgtaccgccgaagtcgactcgaccaggacgatggtcgagcgtgtcgaagcgcatttcgatctcacgccggaacgccttatcggcgataccgcttatggcaccgccccgatgctggcctggatggtagaagaaaaggacatcgagccgcatgtgccggtgtgggacaagaccgagcgcaaggacgacagcctctccagtaacgacttccactggaatcaggaagccaatgaatatcgctgcccagccggcaaaccgctacgcagtgaatggcgtgccttcactcagcaaagatcgcgggtaaccaaggccaacaccatcatttaccgctccagccaaaccgactgcgccacctgctcgttgaaagcgaaatgctgccccaacacgccgaatcggaagatcgtccgcagcatccatgagtcttcccgcgacgtggctcgacgcatcgccaagacaccggaatacctcgtctctcgctgcgaacgaaagaaggtggaaatgcttttcgcccacctcaaacggatcatgaaactcgaccgtttacgactgcgtggcctaacgggtgccactgacgaattcaccttagctgcgatggtgcagaacctgcgccgcatggccaagcttttgcctcaagggccaccgctgacgggataggtacgcctgctacgagcagaaaccctcaaattaacccttaaaccggagcaaggacgctcagtgaaacgccggaaggcaacttgaagtggcttgcagccatttcgacagcagcacacttgatcggcaggctgccgctgaagcttactttttcaacagaatcggccagaagcagacgtttagagcaggaaaatgaatctgtctcctttgggtccaggttggcaacggtgtcttgtcttccattgggcgagcccgtggtttcctaatccgtttggcttccccagcaggccagcggtgtcggagtgcttggcgacttgaggtgtacgacctggccgtgcattacggtgcggggcgctgttcagttaagcggaacggccttacggtgctcaaatccttaagttaacatccagccaacaagcgcgtgcagcgcctggatctggctggaataattggctcagctggttgaagcgaccagtactgcaataattatagctgtgggctatttttcaatcgattctcgatttctgactttattttatgcccctggccctgagtaagctcaaccattgtgcgccgaaagttggctccgccgtttgtaatatctttgaattctttagcagaaatagccttgaacccaaccctgaaatcttcaagtgcttttgaatacttgtcttctggggttccagcatagtcatgcttttcaagctctccagaaacaatgccagatgcaacgacccctacaccactttgatatagatagaccgtgtctcccttggaaagctgacaaatgtactccttccaacctttacaaaaagccgcagcttcctggttttttaacatgctgaaatgagcttgtttgtcgcgattataattggtattgagcatgaaatgcttacggttaaggaagtcgctaggatccctctcttcaggctgagaaggattcgaatacctctcttcaaggagggcatttgtctctttgatccctgccttgatgaattctaagagcagatagctttttgatctgtcgagcgttagcgatagctcgtccagttggttgctgacgttggtgggaagcctgatggatacaggtgtggtcaccgtttcgtccatttgatcgaaaatggatttttcgagcgtctctttgatcaagctcattgtgtcagcctctgtagtcgaaatgtgtggctacagtacacaagctacataatgtagtaaacaaaaatctgattacgctcccctttctctacccttgcacctggccttcagaaatccagtggcagaacgccacgctatgaggatcgccttgctcagagaattccgaaacctgcagcgcgaagcagattcgcgccgaagccggcctgggacgttggcggagctgccacctgctgttataaattaacgataaaatacgttatttttccgctttaaattccttattaatcaatcacctactgtggtgatgacggtatctgattcgagtatcgaccatacgcaggtttgacgcgcaatcgaggcgcttatattttatttcaataattcatgaagtgttgaatcgtatggaagaaaaagacgcgctatcgagtttcgccgcgctctctcacaaggatcgcctacggattatccgtatgttggttgtcgccggcgctgatggtatggccgctggatctatcgccggtgtactcggtgatgctccaccttcaagaatctccttccaccttaaagagctggaacacgctggacttgtgcagggacggcgggatgggaagtcgattatctatagcgccaactggccggtactctccaatcttgtcgcattcctaatgcacgactgctgccagggtcattgcgaatattgcgatagagctattgctctattcgcgaaatgcgagggtcgccccaccggcccaatccgctgcgactagggctatctgatgcaaagaattctctccttcgtagaaaacaaccttttggtgctagctgtcgctgccgccgcactcggtctgctagtgccctctatcgggattgttctcgaaagcggcattggtccgcttctggctctactgatgctggtcatcagcctgacatttgatgtccatgcggtgaaattggttatcaaaaagccgagccggcagctttgggcgctcgccctcgtctatgggcctatgtcgcttgctgggtggttgacgggccggctgttctttggctcggggccgctggccgctggtcaaactcttgttggaacgctacccactgacgtttcggcgccgcttctggttctgctcgcacgcggtaacgtcgcgctcgcggcagtcctcaatgcggttaacacactgctttcgcctttcatcgtgccgttcctgtttctgcagctcaccggaatcgagctgcaagtaccgatcggagcagtgatcatggcattggtgctgatcgtagtagtgccgactgtgctcggcgtttacctgcgcacacgcttcccggaagcggtcagtcgacgcgatgacctctatccatctcttggctcggttctttacctgctgctgctcttggcggtcgttggcccgaacgccgaaacgattcttggctatgggtggtttgcggtcgtgattgcgttggcagcgctcacactaaacctgatcggctatgcggtcggttcgttcgcgagattctttgtggctgataggcaagagttgattgcctacctgttcacggtcagtaaaaaggaattcagcatcgccgctgctttcgtgacagcgtctggcttgccttcggaaatcgctgtacccgccgccttctttgccgtcatccaaatgatcacttcaccgatagccgcgaagctacttgcctcgaaaagccctgccgttgaagcagctccgcaataagagtcatgcctcaaccggcttcggggcttttctagctgtgttaacggcggtctgatgtcggccgtcgccatgcctgaatcagtatctacccgcgagggctgtcgccataaagccgatgattacaatggctgttttcccctaatgtttataattcaataacttatactgatcaaaaaggaagctggaagcgattggcgccacttaagagtggtgccgcttagtcagattcaaggcagcctatgcctaagcaaggcaatggaaaccagtgcgattacgaggacaaaccggctcgctatccataggcatgcctgtcagcacaacgtgcatatcctccgagagttcatcatccctataatttgatgtccctcgtagtgacgcttgtctccgtggcgtctcttccaggtcagttgtgctgcggaaaagtcagctcgaacgtggtccggccgtctttgctgtcgacggccacgtggcctttgtggaggtgcattactgaacggacaatcgctagccccaatcctgccccgcgagtttgtatgccgttaacgcgataaaagcggtcgaacaggtgtgggagatgatccgattcgatagtcgcgccatgattggtgacagccagcgagacgatgtctgcgtccccctcaaggatcttaagctcgaccgtgctgccagtattcgaatgccgcaatgcgttggataacaggttggaaatggcccgttgaaccataagtcgatttcccaaaatcatggcatcgcccgttactgtcgtagcgactcccgcttcttcggctaggacttcgaagtattcacatacgcgcctcgcctcgcttcccaaggataatggttcgagcttcagtgctgggctggcgtggctggcctgggcaagaaacagcatgtctgacacgattcgatccatgcgttcgagttcttcaaccgacgactcgatcacttcacgatactgctccttgcttcgctcacgcaccaaagtcacctgcgccttgcctatcaggttgttcagcggagttttcaactcatgagcgacatcgtccgagaattgagacagttgctgaacgccgtcatcgagtctacgaagcattacgttgaggctgtgcgccaatgcttggagctcttgcggaagccgatcggggcggattcgaggtgatagatcctgtgtcgataccttagtcgccaaggcccggaacttgcgaagcggtcgcaagccattatttgcaaccagccatccagccaacccgatcaatatcagcagcatcggcacggtcactaaggccgagcgcagaaatgcagccaccagccgttgatcggcactgcgatcttgcgaaagtaaaagcgtcattgggcccagtcccggaacctggatctgcttgcgcccggttagcatctgcacgccatttctcgttgtccagccaaggtattcaccgtctctgttcacgagacccagctgctccggggcattggcgaaccggccgatactgaaaatcggtgatttctccgtatcgccgatgacggttatcgaaaggttgtcatggcccagcaccgtatcgctcagcgcatgttgccacgatcggcccatgcgggcttcggtatcctctgcaagtccatgatcaatctgtgcgagtttgtccgtcacttcctcctcggcgcgcgactctagttggcttaccagtacccagtaactcatccctatcaacagcgcaaccaaagcggcgccggtcagcgtgatctgtaacgcgagacgcgatgctagactaagtggtttcaaggccgcgcctccagcacgtagcccacaccccggatagtgtgtatcaggcgatcgccaaagggttcgtccaccttcatccgcaggcggcgaatcgcgacatctaccacgttggtatcgcagtcgaaatttatatcccagaccaaggtagtgatttcggtgcgtgtcagaacctcgccagttcggcgcatgagcagatgcagtagagcgaactctttgctagtgagatcgatacgttggccgttccgataggcgcgatgccggctcgggtccagttcgaggttggcaacacacaggttactcggaagtgagatcggctcgcctcgccgcagcaatgttcgaatacgagcgagcaactcggggaactggaacggcttaaccatatagtcgtcagcgccaagttccagaccgcggaccttttcgtccaagcggccattcgctgtcagcatgatcacgcgagtctgcttacgccgtctgatgagctcgagcacctcccacccatccatggttggcaaattcacatcaagtagcacgaggtcataatcgttctgcagcgccagatgaaacccatcgagaccatcatccgctcgatctatgtggtaaccagattcggcaagaccctgctgcagatattccgcagtttttacttcgtcctctacaaccaaaatgcgcatattttgaggtaactctagttgacggggcgccaaaaaaacatccatcaagtggctacaaagtcaagacggagcgacttggtcggaactgttctaaagaatctgacatatgccgccgtaggccggggtgggaacagtctagcgcggcaggagcgctgggaagctgccttacaaattttgtaacctgccagtcatctggctcgctgcgtaagcagtacttacgcaaaaaaaggcgccctgatgggcgcctgaaacacatcttcaaaccaagggagcaaaactaaagaagatgtggtgttgctcatggtgtttcacaagatcgagagcgggtactcggctatgaatcggacctcatcgaggtcggactcgaaagcagtcgcccgcgtggtagcctggcgcacccgcagagacaaatccttgagagagccagtctgtacaacgtagcgggcttcgacgtcgcgttcccagcggttctgtcccgtcagcggcgcaccgttatcgtcttggcgcatgtacacctcgttcgcattgctgtaatcggcgccccaaccgcgggcgtagcgggtcatgaaagtaagcccgggtatgccgtattccgccatgttcaggtcgtagcgcagcatccaggactgctctttaggtgagttgaaatcactgtactggatggaattgttcaggtagatcgagtccgcctggcgcaagtagtcaaagtcgttgttaccgttgtttcgctgatacgacgccgtgacagtgtgcgcgccgaaggcgacacccaggcttgagctccagatgttgttgtcgaactcgcccagtaattcgcggccttcgtcggttgccttgtagtagttgaaactgcccagcaacgcgacgacatcggaaagcggataggtggccgatagaccgaagtaatgttggttccaggcatccttgaggcggctggtatacaggctaaaactgagattttcgtttacgctatagtcaccgcctgcgtagccgagccaaggggcgtcgacggcaccgccataaaacgtgacgaagtcatcgttcgtgttgctggtattgggctggctcatcgcgtgcaggcggccgccctggagggtgaggtcgtccagcgagttgttcacaacggtgacacccttgaaagactccggcagcagccgtgcgtcaccaaagtgcacgacgggagtagcgggaaatacatcgcctgccttgatctcggtgtccagcaagcgtgctttcaccgcgccccccacccgtgtgaagtcatcctcaggatcgccggcgctgtcgtggggaagcaggtcgatgctgccgcccgcaccggagcgccccgaaccggagtcgagtttgagtccgagcatggcgaaggcgtcgacgccaatccctaccgagccttgggtatatccggactcgaagaaggccatcaatccgtgggcccattcctcggagtagccattgccggtggcactctcaccgtcgcgaaaatctcgattgaaataatagttgcgatttatcagcgatagcgtgctgccttcgatgaagccgtccgctgtttccgattgggctaagaccggggcgctgcccaatgccagtgaaagggctgtcagtgaaaaaacggcctttttgctcatgatgatgctccttgtgtacggcagatcagtgcttgaatgacgcctttcgcctttttgttttttagcgcttggccatgttctccccccccggatgacagcaggattagcggtaaatgactattttgtaatctgaggaatggcatcgctcactctctcgattacagatttgtaatgtttcggtcactcgatcgttatccactcttctataaagtcaccaccccatagcgtcagctatcttgccggcttggcaaggctgataaaaaacgcttatgtgtatttgtttaaacctaaggcgaatcactatcggagtagaggcgcatgtgtttagcgtcttggcgggggtagttcttatgatgggattcgacatctaaaccaggaagtcatcgttttgtcttggatgagaaaaatagttttgctgatgttgctagccttgtttccattgcaatcatcatgggcagttgttagcacgagctgcagtcatgaggatggttcggcagcaaatcattttggacatcacgaacatccgcacgagtctctgggtactgacgaggaaggatcgtcaaaagccgcaaaaaaaatcagtttggatggagactgtgtctttcatggcgaccatatcaagccgcttataacgaaagggatttctcctggttcggtattatcaataagcttgaaaccgtttttttctgctagctacgcatcggctgaagccgggcgtcctgaaaaacctaattggcgcatcggtgcaaagccggtgagacgccagattaaccagtaggacgccatttatctgtatctgaggtctcaccgaaccttcccttttctaggagatttcggtgcgaaaagttattttaccgctggggttgacgatgttgtcgtgcaacctcgcctttgcgcagcctttagagttgccgaccttcacacagaccttacctgccagtgtggcaaataccttccccgttgagtctgtcgactccataagctttctacgcgccttggagctcgctagctctgcaagccctgaattggctgctgcaagacgtgagctggctgcttctcgcgcattgattagccaagccggagcgcgtccgaatccaatattgtccgctagccaggagggaatccgaggtgatgcccccgagacgacgcttgagctgagccaagaaatagagctgggtggtaaacgttcggctcgtattgaggcagcgcaacgcgccatggacgtagcggccgccgacctacaggacgctcaagctcgactgaggggggcagtgatgggcgcatactacgatgtgcttactgctcaagaacggctggagctcgctcaggctgcttcaaagcttgcgaagcaagcagtgaacgtggccaatcggcgtgtgagggccggcatggtttctcccgtagaggaaacccgggcgcgggttgcggctactggagtgcaagtggagcttgcccaggccacagctgaactcgaagctgcgcgcactcgtctggcggccaactggggaaacccacagccacgctttgagcgagtactagagccggcagaggcagtacctccgcttcccgaactagctgagctttatagccgcttgagcgattccgctcaactaacccgcgcgcgtcgggaagcagaaagacgtcgggctgcgttggagctggaaaggacgaatcgcttttctaacgtgacggttagcgtaggtgcccaacgctcagatgaatataacggcacgctgggactggtgagtatctcgatgcccctgccgttgtttgatcgaaaccaaggcaacatcggagcagcgcaggaacgggcctaccaggcgcaggacgagctcaacgccgtccatatacgcctgaaaagcgaactttcccaagcgcacatgcggctgcgcactgcccgccagcagtttgaactgttgcgcaacgacatgctccccagtgcccaaagcgcttatgaagctgccagcaaggggttcgaacttggaaagttcacgttccttgacgtactggatgctcaacgcacgcttttccaagcccgatctcagtatctgtctgcgctatcacaagctaaccaggcggcggcagaaatctcgcgaattgtcggcgatgggtcggccgttatcacctcggccactcagccataaggaatccatatgacaagtaaatcgaacacatcttccttggctgttcacaaaaaacagattttttggatcgtcgtcatattaggcgtggcactggtgcttggtggattacttcttagcagtagtcctgccgtgcccaatgcgagcgacgcgcatggcgagcatggtggcgcttcggagcatgaagatgaagggcattcggatgagaataccgaagccgaaggaggtcatggccatgatgaagaaggcgccgatagcgatcacgaggtcggtgcggcagagaaagatgagcatgacgatggccctgagggagcggcgcacgctgaagcagcagaggttgaactctctgagacccaaatcctagccgcgggcatctcgctagcaaccgctcagcctgcgcagataaaaagcgcaatcgagctgcctggcgaaattacattcaaccaagaccgcacagcgcaagttgtgcctcgtctctcaggtgtcgttgaagcggtcaaagtcgatttgggcgaacaggtgaaacaggggcaagtgcttgctgtgatcgcgagtaccgacctgtcggaacgtagaagcgagttctacgcggcacaaaaacgtcttgcattggctcagaaaacctatcgacgcgaaaaggagctgtgggaagagcgtatttctgcagaacaggattatttacaggcacaacaggctctacgggaagcagagctgacggttgcgaatgcaaaagcacagctacaagcgcttggtagtgatgctggcaagccagacgcattgagccgctacgaactcagggcgccgttcgatgggatgatcgttgagaaggacatcacgctcggtgagtcagtcaataccgacgaccagatattcatcatttccgatctctctaccgtttgggcagatatcagcgttcctgccaatgcactcagcgcggtacgagtcggcagcaacgcggttatcgaagccacagcattcgagtccagtgccaatggcaccgtttcttatgtcggctcacttgttggtcagcaaagccgcgccgctaccgcccgggtcacgcttccgaacccggaaggtgtttggcgtcccggcctgttcgtcaaagtgcgggtaggctctggcggagtgtccgtgccggttgcagtcaagcccgatgcgatccacacgttggaagataatccggtggtgtttgtacggaccgaccatggctttgctgctcagccaatcgtgactggtcgcggcgatagtgaagcggttgaaatcaaggaaggtcttcaggccggagtgcgctatgccttggccaacagtttcatcattaagtccgagcttggcaaagccagcgcctcgcatgctcactgatacggagttatagactgtgttcgaacgtatcattcgcttttctatagagcatcgctggctggttttgctagccgtgcttggcatggcagcgttaggagcttacagctaccaaaagctgcctatcgatgctgtccctgatatcaccaacgtacaggtgcaaatcaacactgcggccccaggttattccccgctggaagtggagcagcgcattacctacccgctcgagacggtaatggccgggttgcccaagctcgagcagacccgttccttgtctcgatatggactttctcagatcacagttatttttgaggaaggcactgacatctattttgcccgccaacttgtgaatgagcgcttgggaggggccaaagatcagcttccggaaggcgtcactccaacacttggccctatttccactgggcttggcgaaatctatttttggacggttgaagctgaggacggtgccaccaaatcggacggtacgccttatacctctgctgacttgcgtgagattcaagattggatcatcaaaccgcaagtccgcaatgtaccaggcgtaactgagatcaatacgatcggaggatatgcaaaggaatatcagatcgcccccaatccagacactttgcggtcgtttggactgacattacaagatctgatcgaagcggttgagcaaaacaataacaatctaggtgccggatatattgaaaaacgcggcgagcagtatcttgttcgtgctccaggacaaatgcaatcagtagaggacatccgcaatacccttattagcaacgttgacggtaccccagtacgtatccgcgacgttgcgacggtagaggttggaaaggagctccgtactggcgcagccaccgagaatggccgcgaagtggttctaggtacggctttcatgcttatcggtgaaaatagccgggtagtttctagggctgtcgatgacaagatgaaagagataaacctttcgcttccagagggcgtaaaggcgattactgtctacgatcgaactgtactcgtagacaaagctatatccaccgttaagaagaacctcactgagggtgccattcttgttgtggttatactttttctcttcttgggcaatatccgtgcggcgatcctaaccgcacttgttataccgctggcgatgctctttacgttcaccggcatggtagccaacgaggtcagcgccaacctgatgagcttaggcgcattggatttcggcatcattatcgatggtgccgtggtgattgttgagaactgcgtgcgtcgacttgctcacgctcagtcccatcacgggcgggcattaacgctgtccgaacggcttcatgaagtgttcgctgcggcaaaggaagtgcgtcggcctctactctatgggcagctgatcattatgatcgtatatctgccgatattcgcccttacaggggtagaaggtaagatgttcacgcccatggcgtttaccgtagtgacagcgctattcggggcgatgattctctcggtgacgttcgtcccggcagccgttgcgctctttatcggcaagcgtgttacagagaaggaaaactttctaatccgcaatgctaaacgggcctacgcacctgcattcgatgcggtgatgtccaacaagccagtagtgctcacctttgccgttgttgcagttgtactttccggcctcgtaggggcacgtatgggcagtgaattcgtgcctagcctcaacgagggggacttcgctatccaagcccttcgtgtaccggctaccagccttagtcagtctgtcgagatgcagcagcagctggagcgaaagctcatggatgagtttccggagatcgagcggatttttgcgcgcacaggcactgcggaggtggcatccgatgccatgcctccaaacatctctgacgggtacgtcatgctgaagccacaagagcagtggccggatccaggcaagtcgcgcgacgaactcttaagcgaggtccaagcatccgccgctgagttaccgggcaataactacgagttttcccagcctattcagctgcgtttcaacgagttgatttccggtgttcgtgccgctgtagccgtgaaaatctatggtgatgacatggaggttcttaacagcacggcggcggaagtgtccgaggtgctaggacaagtaccaggcgcctccgaggttacggtcgagcaaacgactggccttcctatgctcacgattgatatcgatcgcgatcaaatcgcacgatacggcctgagtttagataccgtccagcaagcggttgcagtagccatcgggggccgagaggcaggcaccttgtttcaaggagaccggcgtttcgatatcgtagttcgtttaccggacgagatacgaagcgatctcgccgcaattgagaggctcccaattgcccttccaagggaattaaacagcgccataagttatatccccctcggcgaggtggccactctggatttggcccccggtccgaatcagatcagtagagaggaagggaaacggcgaattgtcgttagtgcaaacgtccgtggtcgggacattggatcattcgtatctgaggcagaacagaaaatccaggcccaagtagatatcccggcaggttattggatcgactggggcggtaccttcgagcagcttgaatcggcaacgaagcggctgcagatcgtcgtccccgtggcgctgctcctggtgttcattctgcttttcatgatgttcaacaatgtcaaagacggcttattggtctttacagggattccatttgcgctcaccggaggcattgttgcgctgtggctgagagatatcccgttgtccatttcagcaggagttggctttattgctctgtcaggcgtcgccgttctaaatggcctggtaatgatctccttcatccgtagcctacgggagcaaggtttacctctggacaccgcgatccgcgagggagctctgacccggctacggccggtattgatgacagccttggtggcttcactcgggttcgttccgatggccttgaatgtgggtaccggtgcagaggtacaacgtccccttgcgacagtggtaatcggagggattctctcctcaacggtgctaacgctattagtgctaccgttgctctaccagctggctcatcggcgcgaagacgaattggaggagcaagaaattgcgctagccgctgacagaactagctagaaaatcgagtggcggcacacaacgccccgttcttgctagctagcgagaacggggcgtgttggtttcggagtgctaagattcagctgcggcgcagcgggcagcaaagcctttatagcgtaggtctaatgcatctaagcggtgaatagaaagggtgctcagcgcttagtgcgtatgactccgcgctacatacgcctcctcggctgatggctttcacccacggtgagctgacgaaaaaagattatgcaagcagcggctgagctgccccgggcggcagcacgggcgatagctacgaaaacgccctggctggaccgatcagcgggctttacaaggccgagctgacaccttcaatcatggacgaaccgcgaggccgttgagagggcgaccctgacatggatgcgttgtacgccaccagcgtctgttcagcccaatcggatatgctcttgcgaacgctaataacaaacagatcaggcgatagcggcctgacttaacgaaacggcctataaaggccagggcgattcgctggtagcgattttgcgtgcaagtgatggacacaaaaaagcgccccgaagggcgcttagagtacaactgctaccaacggagcttggaagctggcggcggcggatatcgttcggatattaagtggttagtcagctttggtttcttttttgatttccatgttgttctgatcctggcgaatatcattaaccttcaactcgcctgcttttttttcggcggattcggttccgtgaattcgcttttgatctgctcggaatttttcattaaatttaatcgagcggtcgtagccatcttctgcataagacaatgcggagccgaatattaccgatccaacaacaatagctttcaacagattcatagggcagtcctcgctaaattcaaaggtgtcttgctgagctttatcggtgagctctacaggttcgaatgaattttgcgtgactgaagctaacagcagcatgagcgaagcattacattattgaaatgtaatgctcccattgtgcagtgacatgatcgccttgcttcgtcatttcagcaccgaggcgcaccaatctgcaaggggcttgagcctacggcaagaatggtcggaagattacattattgtcatcttcagggcatggcaccgcataatccatatcattagcgagcaacgtcgtttagcgtctgagagagatcgacctgttatcggcaagttaaagacgataacgcacgaacttgctcgagagtggtcgcattttctgtcagtgtggcttggagggcccgatggtataggcgctagtatttttattatctcttatgggcggtcgtttggctcccctatttttcttacgctagtttttaaggagcggtaaaaatatggctcacgaacataaccataacaccgaagccatgggcgataagcgtttaatcgcagctattggcgttaatactgcattaactctggcacaagttgttggcggaatactttctggaagtttatcgctcatagctgatgcgctacataacttgagcgatgccgcatcactggttattgcgctcatcgcacgtaagatcggccgcaaaccgccagatgcttttaaaacctttggctaccgacgcagtgaaaccatagcggctttgattaacttggtcacgctgattatcgttggtctctacctcatctacgaagctataggtcggttttttgccccgcagcccattgaaggatggacagtggtcgtggtggcgggaatagccttgattgtagatatcgctacggccttgctgacctacacaatgtctaaggacagcatgaatataaaggcggcattcttgcacaacgtgtcggatgcgctggcctccgtcggcgtcattattgccggaacattaatcctcctgtatggctggtattggacagatactctcctgacactgatgattgctgggtacgtgctctggcagggctttagcatgctgcctaaaaccattcacttgttaatggagggcgcaccagaaggagtttccatcgccgatataatcaacgtcatggaacaagtagacgatgttgaaagtgtgcaccacgtgcatgtttgggaaatcgcggaacacacaactgcattggaagcccacgttgtcataaataaggctaatctgcctgatatcgaacgggtgaagaccgatttaaaacgagtactccatgagcaattcaaagtcagccactcgacacttgaaatggagctagacggcagtgtttgtatcgacaccaggcaggccgacagtcatcgcagcgaagcataagcctgctttgcgctcaacgctgttgctaggtagttagctcgatatcaacggagtgaacttgcgacatcactattggcgctatgtcctctaccagagacatgttagcggcatgtggccaaatcagctctcacgaggagattaggctaggtcgtggctccttcggcgggctgcagcgacgagcaagccccgccagtcgctaccgccgcggacgctcagagccagcggcgaactcgtgcacggtagcgggcaaatgattcgccgaacaatgcttccagcgcccactcttcagctgcgatctggaaacggttcatgtacagcacgaaagcaaccacgcccagcagtgttagaggtgaggccaaggccagcgcccaagccgccagaataatggcgaagcctaagtacatggggttgcggctgtaatggtagatgccagcctccaccaatgccgaagcctgctgcggctgcaatggattgacagtagtacgtgcgcggcgaaacgacagtacgccggcgaaacacacgccgagccccaggaacagtaccggcaaagcgaaggtcagacacgcggtccatgccagttcgatgctcggcaatctggatcccgacaaccccatcagcagagcgatcaggcccgctacgagcagcggtggcacgcggttctccagcgcgctcatagtgtcattcccgtgccttggccacttcgctgctcactaatcggcgcagcggctccgggccgaactcgctgagcgcacgaccatttacaaaaaaggtcggggtgccacgaatcccaacggccttgacgtcctgcatgtccgtttcaagcacggcgttgacgctaggcgtatgcatgtcctggcgggcctgctccaagttcaaaccgacgcgctcggcagcagcccatgcctgcgtgactttggggtcgtcgtgccaaccgggctgggcctccagcacggcctccagcactttttcatgaagattttgcttacgcgccgcctccagcatccgtgatacctcttcggagccctgatggaatagcacatagcgcagcaccaaacgcacatcttccgggttctcggcgagtatctgcttcacatagggatggaatgcgcggcatgcttcgcaggaaggatcgaagaattcgacgatggtcactggagcctgcgccggaccaaatactggtgagtggaagcgaaccagttggccgccgttctgtttgggttgtgtcccggtctcttgggcggtcgaaccgggagcctgggcctgttgaggcgactgcgacggggaatagaagaatgcggcggcagcaaacacggccaggaccacgacactggtgatcaagaccacggaacggcgattcatgaggtggttctccgacggatgagaatgagcaggatggcgataaggataaaagcgaacaaggcaagtgccggcaggggcaccacgccgaagagggtcattccggcgcctgagcaggatggaccagtggccgtgcagggctggatcggctgtggaatcagccctgcatagagcagcgtgtgaacaaatgccagtgccgcaccgatagcggtcagcggcagggcatagcgccagacagtaaaatccgagcggtagcaggcgatggccaggatcaccgccagcggaaacataaaggcgcgctggaaccagcacaaaacacagggtggctggcccatcacctcgccaatgaacagcgcggatagggtcgataccagtgcgaccagccaggttagcagtagtagattccaggccatgcctgacggttgaggcttcattgcggttaactccaggcgatggcgaacacgtgggtcagaaccgccatccagttgattcgaaacatcatgcgtcctcttatcagcaatgtttgttgaggccgttgcaggcttcgccggtgtatctggctcacgggatgccgaaaagcaaccacgcggcctcctgccaccgaacccagggctgggttataaccgatgtcagtgagcgaatcttgtcctatgcaacgaaggggatatcaagattccgggactggctggaagaacaccaaattgcactgtacttcgctgcggtggcacccgctgccattgcaggttgaatttggagcaactcaccgatccggtcgcgatagtcatcaccccggcgattgccgggctgatgtatgccatgtttctaaagattccttccgtggaactgcgagcttttgtcatcgccgcttcgtcgtgcttgttgctagccaactttctgttcgtgccatgaatagtgtggctggtgacgtggccactctgatcgaacaaggccttctccccagggcatggcctcattatcacctatactaagaaagtaacgataaaataggttatcaacaccttgcgcttttggggggtgtacgttgacgaggcttttttcctaggtggcgtcggtaaggccaaagtgctcagcgccttcaaccctcacattttctttgacgatcaagatgtgcatttggaagcagccgcgaccctggtgccgtctgccaaagtaccttatctgactaaatctggcctggccggcttgctagctgctccagtcgagtaggtcgccgtctatgcacgcaagggaatgccgatgtcttcacaaaagtactccgtcaaccaacacctgatcgaaactctgctgagttgggttaaatccggcgaaatcgccattccagaaatccagcgtcctttcgtgtgggatgccacaaaggttcgagacctaatggacagcctgtatcagggctttcctgtcggttacatcattgcttggcgaaaccccacggtgaagctcaaggatggctcgctggccgaggggaagaaggtgctgatcgatggccagcagcgggtgacggcgctgactgctgccatcgccgggcagcaggtgatcaaccaagattaccaacaggtgcgtattcgcatcgctttccaccccatggaagagcgcttcgaagttagtaacccggccatcgagaaggacaaagcgtggtttgccgatatcgcacctatcgttagtggtgagctgaaggcgcataagctagtgccaggctatgtcgccgctaatgccggggtgagcgaggatctggtctacgagcggctggacaggttgtgcgatattaccaagaagcaaatcggcctgatcgaactggcggcggacctcgacatcgagacggtgaccgaaatctttatccgcatcaactcaaagggcgtggtgctcagccaggcggacttcgtcatgtcgaagatcgcggccaacgaggagtttgatggcaacaccttgcgcaaggccattgactacttttgccacctggccatcgcgccggagttctacgcgcatatcgagaacaacgataagactttcgtgcagaccgattacttcaaagctatgcgctggctgaagagtgagaacgacgacctctacgaccccagctactcggacatgctgcgggtagcgttcactaccaagttcaatcgtgggaggctgtcggatctggtcgggcttctctctggccgcaactttgaaacccgcagctatgagaaggaaatcgaggaagcgtccttcaagaccctgagcgaaggagtcagggagttcatcaacgagacgcacttcaagcgcttcctgatgatcatccgctcggctggctacgtggacagctcactgatcggctcggtaaacgcactgaactttgcttacgtgctctatctcaagctcaaacgcgacctaggcaacaatcccaatatcgaaagctgggtgcgtcgctggttcgtgatgtcgctgctcactggccgctactctggatcgccggagtcacggttcgacaaggacatcaaagctgtacacgaccggccgtttgctgatgtgttggcggagatcgaatcggctgacctttccgacgccttctgggacttcggcttgccgcaggcgctgaacacctcttcagtgaatgctccggccatcaaggtgttctgggccgcgcaggccaatcggggtgacaagggcttcctgtctaaggacatcaccgtgcgtgacatgctcacgcatcatggcgacatccaccatatattcccgaagaacttccttaagaatcgagggttggccaagagcaggtacaaccaggtggctaacttcgtgtttgtacagcaggaagtgaacatcaaaattggccataccgcaccggctacctacatggccgatgtgttagcccagtgtgagtcgggtgaagcacgctatggagccatcacttgcctggatgacctcaaaggcaacttggccgccaactgcttaccggaagaattgaccgcctaccggcctgaacggtttgatgagtttctggctgaacgtcgtaggctgatggcgcagaagatcaagcagtattactgggggctgtgagcaactgtatcggggagttctgtgatgtcatggcctgcgcatgtattattttatggttaagtgagcgttgtggatacgatatcgtccttggccaacgaaccaaagtccggaatgcgatatagaaaggatagaatttttgcacctttgcaatgtttggcttttggggttatataaaaaataatgctctggttgttgtttttttgttttcgtatttgcaataattgattgtgtggcatgtgtcacgcaaataataattagaagaataatatgaatgcagagactcaaagcgcctatattagtttggccagtaatttttatgcgactcggatgcagggcgttgagcttgatgagctcaatattattggtgctttactacgggcggcccctgattaccgcccggattattatcggcgcctacgtaacgctttggcgtttgatcaaaagcatcgaggaaatttctgggctgcccaagaaatcaatcgtacgctcaatccggtcactgtgttaaatctgccgcgaaagaaaaagcagcgacgtccgcagaagctttctaccgctgatttcgaagcgtggctacggtgtctggctgaacgagatatgcctgtcgaagcgggagctttaatggtgatatctcttaccggagcgcgaccatgcgagcttaacggaatttctatcgatggccggcgcatccatatatccggtgcaaagcttagccacaacggtttacgcggcgctagccgaacgcttgaggctgatggagacgtctgcaatatcttgagaaacgctctcgctgcttttaaatgtcagccgcgcagtatggattcaatacgcgttgcgcttcaccaagtcgctactgagctattcggtaggaggaaggtgccgagtatgtacacacttcgtcaccagttcggctcaaatctgaaagcctcaggcatgtccgcaatagaaatggcatacgtcatggggcaccaggctaccgattcgattagccgctatggcgataaaagatttggacgtgcagaagcggttaaggttaagcctgcaagcgatgctgacttttcaaaggtgagagatacagtgcctgctcgaatgcgtgcggacgccgtggctcttaatgatcagcgagacttggatcgtaggactgaggtcgctgacggctgaggtgatgtggtcatttcagcggacaatcatgaattccttaggctatagagcgtttgtatctagctctggttttgatagcggtttccacctttacgtcgtcaacgctcaggtatctgttacgtaatcttggacacatgggtgtcgcccaccggcagcttgcggccagaagtggtcaatcgagtatgtctaaaaaggcttttcattgctttgctggaacttccccagactcagcagagatcgaaagcggtgagatccaatccttgcgtgagggggaggcaaatgagcgcgccgacatcatcaactccgtaatcgaagagctgatctgccaagattactcgactctaaatgatctcgctgagcgaattcatgccgaatcccaagaggcaatattcaacctcgtagtaaccagaacgccagtcgaggtgatccacaagctaaaggatctgctcgacactgacttcggccgacgccagagtgacttcaatacgctgaagcagtcacccaagaagccatctcgcaagcacctagaggtactgatcgaccatctggcttagctagagagcttcggggatctgggttccatttttgaaggaattgtcgacactaagatccgccactttgctgcccaagccgcggcgtcggacgtagccgagttgaaggactgcttactgccgaagcgctacacgctgatgctggccttaatctaccgcatgcgcatgcggacccgggatcatatggccgagatgttcagccccgcgcgccgaacgccattcatttaacgcatgcgtcctcgcttattcccgcgagaattccacaagccttaacttcccgcccatcgttgcaatttgcccgcagcgaaacgagttgtcgttccagtgattgcaaagcggctatctgagacctgacttgagaaatgtgatcatcaagcaaggcattaacggccgcacaaggccggccagggtcatcttggtaactttggagtgcatgaatttctggaagtgaaagattcagaattcggcagcgtcggatgaacgctagccgctcgccatgcttctcgttgtaaacccgatagccgttcggctgacgattaggcggaggtaacaatccctgctgctcatagaagcggatcgtctgtgtatcaatccctactagccttgctaactgaccaatgcgcatcgcgcgaatcctcttcggttctctgcgttattgaccttatggtagctataaggtttttaatgatcccatcttcgatttcaagtggagccgtatcatgagcaaatccgatggcgatcgttgcggctgcgatgcgacaccagccgccgatgccggtgtgcaaaaccctgccgatacgacagcacaatgggtcagtgtttacgccgtgccaaaaatggattgtccatcagaagagcgaatgatccgcttggccctgagtggtttggacggaattcggaagctgacttttgatttgtcggaccgtcggttagatgtcatgcattgcggtgccgttgagcccataaccacaaagctggcgacgttagggctaggcgccactcttcagaaaaccgtcgctgccgacccagagatgatcaaagccgccgagaattcggcggactctacacaggaatcccgctccctgcgtttactgttaggcatcaacgccttcatgttcgtggtagagatgaccgctggcctgatcgccaggtccacgggcctgattgccgattcgctcgatatgttcgctgacgcggcagtgtacggcctagccctttatgcagttggacgtagcgtcagtctgcaggtgcgtgctgcacaccttgctggtgttctccagctaattttggcactcggcgtgctcgtagaggtgattaggcgctttgtattcggtagtgagcccgagtcgctgataatgatcgccgttgcgttcctggcattgctcgccaatacgggctgtctgctgcttatttccaaacaccgggaaggtggtgctcacatgaaagcgagctggatattctccgccaatgatgtggtcatcaacatgggggttatagtcgccggagcgctcgtcgcttggactgggtcaaactacccagacctgattatcggtaccgttgtgggattcatcgttctaaacggcgctcggcgtattctggcgctcaagagctaaagaagctcccgttacagaaaaaggcgtcgtcatgcctctaagccatccgggtctagcggcgtcagctaaaactggcgacgcagctttagccgttagcggatggtgggtattgtagaacgtgggctgcaaagtccatcagcgagacgaagccgcactgatcggctttccttcacgctgttggtggtagccccgcttaaccaatcagctctacgaatgcctgagtgatcacaaccgctgcggccaatgcgcgaacggactttgggagcgccatcgtcaggaaaagcactacaagcgagttgtgagtgcttgaactgaaggccgatagctggaggcgacctcgatgtgcgctagtgctacgttctagtgacagtccccgtgcccaaaatgtggtctgcaaattcgatcaggctagctaatcggtcaggaccacggatggcatcgcgctggaggtggaagccatgcattcccagcctttcgggaccgaacacatcggcctccaatgtatcgccgatcattgcaatggaagacgctttgcaacccaaccgctttagcagatgttcgtagatcgctggctccggtttgatcgcgcccacctcgaagctccaggcataggcgtcaaactcaggcagtagcaacttggcaggtatggcatagggggtagccaagttggagcacagcgccactttcagccccgctctcttaaggctttccagtgcccgcagggcatcatcatagggacgcacgctggccagttccgcgtagagatcaagctccaaaatagcaagctcatcgttacctagttgtgtaccaaacaggtcggcggcgccggccagccccaagtttcgtgtcatcaatgtcctggcatcatcggccctaggttgacgaccttggctgcgtacctgttttaagagcttgcgaaatggccgccgtcgttcactgatttgcaggagtgtgccatagacatcaaaaattacggcttctatcaaaacagagcacctgcgcttaggctttgcacggttcggtattcattaaaagaaagcggccgggcttcggataagggaggcataggctaggccagcaagcggtattcgcgcgagctacttttttcagcagctcgcttcagcattcgtacgacctgacataccggagaacctgacagaaatgtaatggttacttcagcctttggtcaggacgctttgcatatattggttgtcggacgctgtaagcatcggaaaaaccacaaacgtccccgcagtaggctgttcgttgctaaccaatccataaggagcccgcatgacctcctcgcattgccaccatcagcctgaccaaacgaaaggatcagcaccgctcacagacccggtctgcgggatgaaggtgaaagagaacagcgagcatgagcaggattaccaaggaaccacttaccgcttctgcagccaggggtgccggaccaagttccgttctgatcctgctagatatcttgctgcacagcaggctcatgggtcatcgcctcaggcatccacgccgcccgcacagaaggcgtccgccggtgatgcaacgaccgagtacacctgcccgatgcaccctgagatccgccaaatgggtccaggtgattgccctatctgcgggatgtcattggaacctctgatccctgaactcgacgaggaggagaatcccgaactcaaggacttctcgaagcgattctggtggtctctgcccctgaccgtagcagtaaccctgttggcaatggcgggacatgcgataccgctgtttcacggcgctagccagaactgggttgaactagcccttacgaccccggttgtcttgtgggcaggttggccatttttcgtgcgcggtttcgcatcagttaagcatcgcagcccaaacatgtggacgttgatcgggcttggcacaggggctgcgtatatttacagcatcgtagcaaccgtcttaccgagcatatttccagagtcattcactgtgggcggccggataggcgtttattacgaagccgccgcggtcatcatttccctgacgcttttagggcagctgctcgaattgaaggcccgctcccagacgtcctcggcaatcaagtccttgcttggcctatcgcccaaaacagctcgccgtatcgccaaggatggttccgaggaggacattccgcttacacatgttcacgagggtgaccatctgcgcgttcgtcctggtgaaaaggtaccggtggatggagaagtattggagggcgagagcgccgtcgacgaatccatgctaacgggcgagcccgtcccggtgacgaagcggacaggcgattcgcttatcggcgcgacgatgaacacgagcggctcgcttgtcatgcgagccaccagggttggctccgggactatgctttcacaaatcgtccagatggttgcgaatgcgcaacgctccaaagcacccatgcagcgaatggcggacacggttgcgggttatttcgtgctgacggtcattggtatcgccttgctgacattctttgcatggggcctgtttggacccgagcagggctgggtattcggcctgatcaatgcagttgcggttctgatcattgcttgcccttgcgcacttggccttgcaacgcctatgtcgatcatggttgccacaggcaaagcggctggaagcggagtgcttttcagagacgcaggcgccatcgagaacgtccgtaaggtagacacgctgattgtcgataaaacaggaaccttgaccgagggccgacctgtcttcgatcgggccataggcgtcacgccgtttgactcgcaggaagtcatccgtttgtctgccagcttggatcaaggtagtgagcatcccctagcccacgcgatcgtagaccatgccagaagcgaaggtatccagctggcgaagccagagaccttcgagtcagggtcaggtatcggagtccgtggtctggtggaaggcaagcagctacaactaggcaacaccgcgcttatggaagatacgggtgtgagcgtcgagccgttgagagatcaggcagaaaaaatgcgcgagagcggtaccagcattgtgtacctggctgttgatggggcacttgccggcttgctggccgtatcggacccaatcaaaccgacttccaaggaagctgtagcgcggctccaagcggagggcgtgcaagtcatcatggccaccggcgacgggcttaccactgcccgcgcggtggctcgtgagctatcgatcgatgaggtgcatggcgaagtgaagccgcaggacaaggaggcgctggtggttaagctacaagccctaggtaaagtagtcgccatggcaggcgacggaataaatgatgcgccggcgctcgccagggctgatgtcggcatagcgatgggcacgggcactgacgtcgccatgaacagcgcccaagttacgctcgttaaaggtgacctgatggggatactgcgcgcgcgcacgctttcggtggcgacggttcgcaatatgcgtcagaaccttctgtttgcctttatgtacaacgggttgagcatcccgattgccgcaggtctgctctatccgttcttcggactgctgctgtctccgatgattgctgccctggccatgagcctcagctcagcatcggttgtgttcaacgcactccggctccgtcaaacgcgtgtagtttgaagcctgtcggcttaggcttaggcttaggcttaggcttcggttgcgaagcgaccgaagcctcattgattgctcatgaattgccccgtaagctggaaatatgaagtcctacatgcgctccttccttatcctgctgctagtgcttgcgcttccgatcaatgggatagcggaaatgctcatgccggttggatcgtccgggcatcacgtgatgtccgatatggaaggtgtgggcgccatgacgaccgaccacgcttcgatggttggcgccgatgacggtgctgaacacgagtgctgtgaagcgaatgagcatggaacggcgaccgtctgcaagacgggccaagaatgcaaaactgcaagtatccttcagcttgtctcaataaaagcccagctgatgcctgctgctaaacccgtgaccactccctataacggcctgatcccctctagccttttagacgccgtctggcatccaccccgcgtctaattccgatcaaattataggaaccgcccgagtgagcattcgggccggctaccgcgcgcctttggctcgcatgaaagatcaggaatccttcgcaaatgaaaccccgtatttattgggcgccgccgtacgtggccgccttgatcatgggcgcgctctcgtttccagggttagcgtccgctttgaccttagaacaagctctgagcgtggccgagcaagacgcgccttcgctgcatgcgcaagccgccaacctggtggccgcacgcagcgctgcaatccctgccggcgagcttcctgaccctaaacttaagcttggactgcaaagcgtgcccatcgaaggtgacgctcgctggcagttggagcaagaggccatgaccatgcaaatggttggggtcatgcaagatgtgccaaaccgagcgaaaaggcgcgctcgtgtcgaggccgcgcaggctagtgttgcgctcgcaaacgcccagcaaacggttgaacgtctcggtgtgcgccaagcaaccgccgaggcatggatcgctagcttcgcggtcgagcagaagctaagccttttcaagcagctttacagcgagaatcagctcctttcgcgggctgttcaggcccgcattgctggcggcagcggacaaaccgcagacagcgtacttccgaggcaagaggcagcattgctggctgaacaagaggatgagctgctgcgtaaccaggctgttgcgcgggccggcctccggcgctggataggcgagctagcaggccagccgcttacaggtgactggccgcaatggcttgccgccgttgataactatcagcacaacctgaaccggcacccggcgttactcgccttcgacccgatgactcgtgaagcggaggcaaaggttcaccaggccatcgcagagaaaacaccggattggagttggggggtcgactacctgcgacgtggccgtgagtacggcgacatggtgaacctcagcgtcagcttcgacctgccgctgtttaccagctctcggcaggatccgaagatcgcggccgaacgagctcgccttgcccagatcgaggctcagcgccaagcgaccttgcgcctgtacaaccaagagctgagtactgacctcgctgagtatcagcgtctggaccgcgcactcatccgcctcgacaaaaccttactacccctcgctgaagagaaggtccgccttgccatggccgattaccgctccggaagcggtgagctgaccgctgtgatcgaagcgcgacgacagcttgtggagacccggctacggcgtattgacgtcgcccgcgatcgatcgttgagcaatgcccgcctgcatttcgcctttggagatacccgaccatgacattccaacacaagcggctggtactcgccttcagtctgcctctgatgattagcgctgcagcgctaatcggtctgcctaccgcagccttcggacaatcgcctgcagaagaagacaaggaagtgctctattggtatgaccctatggtaccccagcaaaagttcgataagccgggcaagtcgccattcatggatatggaattgattccacgctatgcagatgagggaagcgacggggcatcgatcagtatcgacccgagcgtgacgcagaatctcggcgtgcgcttggcaaccgtaacgcgtgaatcgatcagccagtcgctcgaagcgacaggcgcgttgatgtttgacgagcgagacgtggcggttgtgcaggcgcgtgccggtggctttgtcgagcgcgtttacgaccgagcaccggaggatgtcatcgaaaaaggcgcgccgttagccgatcttttggttcccgaatgggctgccgcacaggaagagtacctggcgctcaaaggggtcggccaaccccagctgctcgcagcggctcgccagcggttgcgccttgctggcatgccgccagaagtcatagtgcagctagaacgaactggtaaagcgcgccccgtttggacagtgacgagtccaataggcggcgtgctgaacagcctcgacgttcgcgagggcatgaccgtacccgccggcgctactcttgcgcgcgtcaacgggctggacacggtttggctagaagttgcagtaccagaggcgcggatcgcaaatttagcgccagggcaatcagtaacaacgcgcctgcccgcttttgcgggtgaaacgctggaaggaacgatccagacggtactatcgcaggccaacctggatagccgcactgtgcgtgtccgggtcgagctacctaacccgcaacaacggcttcgtcccggcatgacggccgaggtgacgttgagtcgcaacgtcgaagatgtcttggtcatcccgtccgaggcggtcattcgcaccggtcggcgcgcattggtgatgctggccgaggatcaaggccgttaccgcccgattgaggttcgcacaggccgggaattcgatgaccagacagaggtgcttgaagggctggaagccggtcagaaggtcgtggcgtccggtcagtttctcctggattcagaggcgagcctacgcgggctgaccgctcagggtttggaggagcctgcaacttctacagaacctgcgctgcacgaggctgaaggtacgatcgtcagcctggaagatggcatggttggcctgtcgcatgggccgttcaagacgctgaacatgcctgggatgacaatgtcctttccggttgcagatcaatcgctcctaacaaagttgcagaccggcgatcacgtccgtgtcggcgcgcgtgaaagcgaagagggcctggtcattgagcacatcgagaagctggggggccagccatgatcgcagccataattcgctggtcagtggccaaccgctttctgatcctgctggctactgtgttcgcggtggcttggggtgtctggtcggtcaaaaacaccgctgttgatgcattgccagacctttccgacgttcaggtcatcatccgcacgccataccccgggcaggcgccccagatcgttgagaatcaggtcacctacccactgacgacgaccatgctgtctgtccccggcgcaaagacggtccgcggctactccttcttcggggatagctacgtgtacgtcctgtttgaggacggcactgacctctattgggcccgttctcgggtgctggagtacctgagtcaggtgcagagtcggcttcccgccgccgccaaacccgctttgggccctgacgccacaggtgtcggctggatctaccaatatgctttggtagaccgaacgggcaaacatgacctctcgcagctgcgctctttgcaagattggttcctgcgctatgagctcaagacactgcccaacgtggcggaagtcgcgcccataggcgggatggtcaagcagtatcaggtcgtactggatcccgtgcgcatggcaagcaggggcgtgacgcagcagcagattgcaaaggcgatcgatgaagccaaccgtgaaaccggcgggagtgttctggaactcgcagaaaccgagttcatggtccgtgcgaccgggtatctcaagacactcaaagactttcgagccattcctttgcgtctcgacggcggcgtgccagtgacgctaggggacgttgcgcatatccagctcggcccggaaatgcgccggggcatcagcgagcttgacggtgaaggtgaggtagtcggcggcgtggtgatcctgcggagcggcaagaacgctcgggaaaccatcgctgccgttcagaccaaactggatgagctgaaagcgagcctgccccaaggcgtcgaaatcgtcacgacgtacgaccgtagcaagctgatcgacagtgccgttgaaaacctcacgcacaagctcatcgaggagttcattgtcgttgcgttggtttgcgcgatttttctgtggcatctgcgctcgtcgttggtcgccatcgtgtcgttgccgatcggcatcctgattgcttttgtgatcatgcagcggcaaggcatcaacgccaacatcatgtcgttgggtggcatcgcgatcgccatcggagcgatggtcgatgcagcaatcgtcatgatcgaaaacgcccacaagcacattgaggcctggcacaagcggcatcctgactccaccttgaagggccaggagcactggaaggtcattactgacgcggctgttgaagtggggccggcattgttcttcagcctgctgatcatcacgctgtcgttcattccagtgttcaccctggaggcgcaggaaggccggctgttcggtccactggcgttcaccaaaacctatgcaatggcagccgccgcgggcctgtctgtcacgctggttccggtgctcatggggtattggatcaggggcaaaatccctgacgaacaccgtaatccactcaaccgtggcctcatctggatctacaagccggccctggacgcggtactgcgctggcccaagatgactctgctggtggctgttctggtcttcctgacaggcttgtggccggcctctcgccttggtggggagttcttgcccccgctggatgaaggtgacctcctttatatgcccactgcgcttccaggcctctccgctcagaaggcttctgagctactgcagcagacggaccggctcataaaaacggttccagaagttgcacacgtgttcggtaaggctggtcgagccgacaccgctacagatcccgccccgctggaaatgttcgagacgaccattcagttcaagccgaaggatcaatggcgccctgggatgacgcctgacaagctggttgaggagttggatcgcaccgtacaggtacctggattagccaatctgtggatcccgccgattcgaaaccgtatcgatatgctggcgacgggtatcaagagcccgatcggggtgaaagtgtatggcactgacttggcacagatcgacaaagccacccaggcagtggaaaaaatcgccaaaacggtgcctggggtcagttcggcgcttgccgagagactgaccggcggcaggtatatcgatgtggatatcgatcgtgtcgccgccgcacgctacggcctgaatatcgcggacgtgcaatcgatcgtggccggtgccatcggtggtcaaaccattggtgaaaccgtggaagggctcgccaggtatccgatcaacctccgctatggccgcgagtggcgcgactcgatatccgatctgcgcaacctaccgatctacacgccgcaaggcagccagatcacgttggggaccgtggccaaagtacaggtgacagacggaccgcccatgcttaaaagcgaaaacgcaaggctgtcgggctgggtttacgtcgatgttcgtggccgcgacatggcggctgtggtgggcgatctgagggaaaagatcagcaaaggggtccagctcgaatccggcatgagcatcagctattccggccaattcgaattcatggagcgcgctaacgcgaagctgaagctcgtcgttccggctaccttgctggtcatttttgtattgctctacctaacgtttgcccgctttggcgaggcgctgctcatcatggctacgctgccattcgctctgaccgggggcgtctggttcctatatctgctcgggtacaacctatccgtagcgacaggaatcggattcatcgcactggcaggcgtttctgctgagttcggcgtcattatgctgctgtatttgaagaacgcctggacggatcgggttaacgctggagcccatggcgaaggcgtcctgctcgacgccattcgtgaaggtgctgtccagcgagtgcgccccaaggccatgaccgtcgccgtgatcatcgctggcctgctgcccatcctttggggcggcgggaccggcagcgaaatcatgagccgtattgccgcgcccatggtgggcgggatgatcaccgcgccgttgctctccctgttcgttctgccggcagcctacctgctgatgcgccgccggcaattgcaggcccagcacgcaaccaaacccactggtgaacatccatgaatatcaagcacatcactctcgccacactgtttctggtaccggccgcctatgctgctgacaaagagcctatgcagggtatgccgatggatcacaaaagcatgaacatgccgatggatcacaaaagcatgaacatgccgatggatcataaagacatggatatgcagatgggccagaaaccagccggacagacggccactgcgaccggcacggtcaagaaggtagatacggaaaagggaaccgtcactattgcccacggcccggtcgaggcgctgggttggccatctatgacgatgggtttcaaagcgaagcctgatcagctccaaaagttaagagaaggagaccaggtcgaattcgagttcccctcgaaaggcatggattccaccattacgcgtatcgaaaaacggtaagcacagaaagcgaccgccgcagacgcggcggtcgtaccaacaaaaaaatgagcgattacagctttgtaaccttggcaacagcttcttgtaagtagcaagcctttaatctacaggcatcaactaaccaagaggtgcaaaccatgaaccgtataaccaaagtaatcgttccttttattctgaccgttgcgtcttctcttgcaatggccgaaggcggaagcgatcggacaatgcatcgcctaaatgatcctgcaggatccaatctcactcttaaagagcttgtcaaagaaggcaaagtgctgagcatcgcacctgcaggggcgaccggtacgactgaaatgattcagaactatcggactactgcaaaagttcagacatatgaaatgaaggtaaagaccccagacggggagattcatacggtggaatttttgagcgcaccggtaggcgtaaacaacggctaacctgcaaattaaatattcgagggtaatgatatgagcagcctgttttcgagaatgaaaagtgtactgcagcgcaatccgatcgtgaccggtctaaccgtagctgtggttggctacatgctcctgaaccaaagcactggggcgttggcaacgacgctgccaagcctgctctttctcttgccctgcttgttgatgatggtcgtatgcatgaagcatatgtctagcggtaagtgcgacaagcccaaggagcccaacgttggcgaaagcaccttgttaagcaagagcgaataacccactgaacttggagatttaacatgcgaaacaccattacagtaacagcaattgcaatcaccctggcgagcggactgagtttcgcagcggcagataaagcggaccaaagccattcagaaaccggcatgatgagcggcgacaagcatatggaaatgatgggcgacatgcgtggaatgatgaaagagtgtcgtgaaatgatggaggcggccaaagccggccactcgcaaaatggggaaaacccagacgctgcctaggatacgagagtgcgagcaactatgatcgaagcaggtcgggcaccttttctgggtgcccacctgcttttttgtgcgtgatggcctaaccaggaccgtactgatgggaaaagtgtcactgacgagcagaatggcgatagctttcatgctcgtggttacggttgtgctgttggccgccgcaatcagcttcaattatttttgccagctccatttcgaacgcaaagacgcacaggtgctgaatgaaaaggctgctgcagtagagcgtatgctacgcggcagttcagaattcgggcctgagaccgcttcaaggatcgatgctgttattgagcactcctttggcttcgcaactgcggttgtagtagacggtaagacggtttactcccatcacaatctgtctgagagcttgctacctcttgtcacggacatccaagaggaacgctggacggtaagtttcggtggccaccagtacagcggcatcactagaaaagtaaaccggtgggtagaagggcaggacactgttatctatttggcattggatgtaacgcaccgaatccacttcttcgatatgattcagcagtggtttgcttatacgcttgtcgttagtgcacttctgagtggcgcgttaggtgttgttctgatcaggaagggtttaaaaccgattgatgagctctctaagacctcttctacagtaactgccaattgtttggataccagaattccaaccgaatcagtgccaggcgagcttcatgaactcgtagacaacttcaatgaaatgctctcgcgcttggatgactctttcctcaggttgtcaggtttctcagcggacatcgcgcatgagctaagaacgccgctgaacagcatgctgacccaaatggaggtcgcgctcttgcgcgaccgagaaaataccgactacaaggatatcttgtattccgccctcgaagaacttaggcgcatgtccaagatggtcgatgacatgctgtttctcgccaaagcggacaatgggaagattacacccagtgccgaaggggccagcatggctgagattaccacgagcgttatcgaatattacgagctcgcagccgaggacaaaaaagttgaaatcgagctttcaggcgatgggtcggtacatggcgataaatcaatgctaagacgggccatctcaaacatagtctcgaacgcagttcggtatgcagaggaaggcagcattatcagcgttgaaataagcgagagtggtaactcggtttctacagctatatccaaccgcggcattactattccagccgagctgcacacccgaatattcgacaggttctacagggtggataccgcaaggcgcgaaggtactaccttgaatgcgggcctcggcatggctatcacacggtcgattgtggaggcccacaaagggcgcatcgcttgcgaatcagctgaggggcacacgactttcacactgacgcttccaaggctgatgtctagttaacggcgcattggccgacaacggccctgacctaagcttatcgaaatgccctgctgaaccgaaagaggccaaggctttcgaaactgtatgtttggttctggaggttcccgtgcaagcgacctcatcaacaaaatgcggttcgacagccgcagcgcttaacgaagcgtgcttctgcgtaagcctagatcaagctgcgctcgtaaacgcattgaccgaacagcttggggattcagagctttcggagctattgaagtcacgttgcccccatctgtttgctgcacgaccggtctttgtttcgtccttgcggctgcgccaggttagtgaggttattcaggccatcgagcagaccgtgagctcgcccggttggcgtgagcatgctctggattatgccccacctattgcgcgacacaatccgcgtggctcgcatggcgtcttcttcggctacgattttcatctggatgaggacaagcttggtcttatcgaaataaacacaaatgcgggcggagcgatgctgaacgtattgctcgcccgcgctcagcgcagttgttgcagcggcgtagtcgggctatcgccggggcaggaagggcccggcggcttcgagcagtcgatactgcatatgttcgcccaggaatggtctgcaagcggcgagaaacgaccgctcacgcgcgtggtgatcttggatgaaagcccacaagcccagtacctgtatccggagtttcttctttttcagcggttattcgagtcagcaggaatcgactgcataattgcagacccagccgatctggcctttcacaacgattgcctcttggtcgacgaaaatcctgtggatctcgtctacaaccgactcaccgatttctatctggaaggtgacaattgcagcgcgctgcgcagcgcttatatggctgatgtcgtgacggtaacgccacaccctcaggcctatgccctttacgccgacaaacgccggttggttgacctaaccaacgcacgttttttggaagagattggcgtcgatcagcaagtccgagccgtgttggcccaatacgtcccgcttactgtcccggtcgagcatcgcaatgcggagcaactctgggagagacgccgcagcctctttttcaagcctgttagcggttttggtagtcgcggggcataccgaggagacaagctcaccaagcgtgtgtgggaagaaatcgttggcggaaactacgtggcccagtccctcttggctcctggcgagcgtagaactatcgctgaccctcaggtacgaccaatgaagtttgacctgcgcgcatacgcttatgctggcaaggtgcagtggaacgctgccagggtctaccaaggccagacaaccaacttccgaacagaggggggcggttttgctcctgtgtttaccttaggtgaggaagaggagcgaaccggttccacagagcagcggtcgcacgcctcgttcacgttcttgcttgacgaaaccggtgccgtagatgaactgccgcacccacaatatctggcgttggttcgagctgaaaaggctacctcaacgcttgccggtaaacgtttccgattggccgactggtatgtggcaatagaagatggccgtccttccaaagtcatccgagaatggtacggctgggtagcgttcgacgaagctggtggttaccaccctgaagctgattcgccgaactgcaagtcagacagtgcaggcaatatagactcatccgcactaccgacaccggaagagcacgatcgaatcgagagattgttgtttcaagcgaataatggcctgtcttgcaagcccctgagataggcctagggcgctcgtctcagcgagcaggcccatcagaattgtaccgtccaatgattcatgccgctcaggccggtcagactcgactccatgcccatgtttcgtctgctttcttataattaatttaacgccctattggttcattcttcgatagcgtcagcgcgtcaagtccacttatcaaacccgcgctacctaatgggcgcttaagctgggtgatgattacatttctgtaagcttccaaaaaaatcgaaacctcacaactctcgacttgtcctttttaagtgacaccgcaggctggtttctcttcctcaaacaaaccaatgggcgaggtacacagtgaggtcgaacaagaaatgtatagctactggtgtagccgctgggatcgctggaaccctgttgctgggtgctattgtcgggattaccgttgtttacacgggggcctataacgtcgcagcgacggaagaccatcaaccattagtgcgctgggctttggacacgactatgcaatcgtcggttgcggatggtgcatcttccattaaaccgcccgcgcaattcagtgcaaaaacggtttctgaaggtggcagtgcttatcaagccatgtgccagcattgccatggggcacccggtgttgagaaaagcgagtgggctcggggaatgctgccgcagcccccacaccttcccgacgtagttcctgaatggaaagccaatgaggtgttctggctggtgaagcacggcgttcgaatgagcgcaatgcccgcgttcggcccgacccacaacgacgacgaaatctgggcgataacagcattcgtgatgcagcttccaggcatgactgcgcaaaaatacgctgagtttggaaaaaacgattcggccgtagccccccattaaagaggaactagttcatgcaaatgtcttactggcgctttgcagcgatgatagcaacttcgaccctcatcatgtatggcgttatgtatttaaatacatacgcatttgaacatgttctatggagcgagacccgcgtttggatggcgttagtgatgggcgcggtgatggccgtagttatgctcgcattcatgcttaatatgtataaacgaaaatcggttaatattgccatattcgcaggcagtgcagcggcctttgctattgcgctgtggcttgttcgtagccaggcaacggtaggcgacacggaatacatgaaggcgatggttccccaccattccatagctatcatgacaagcgagcgcgctcagatttcagaccctcgggtccgcaaactggctgacgaaatcattgaggctcagcgccgagaaatagctgagatgaagtttctcatccatgatctagagagggctaactgatgcaactgtatcgagcacccgctatagcccgggccattcttcccaagaccatcatgacgaccttcgctctggcactcactgcttgtggtgacccggctcctggtgaaggcctggataagccaacaatgcggccccccctacctgaagtggtaagcgcccgtgacgctataggaagtcccgacattccgtctattgacccgcaaacccttgatcaagcggaagtagacaaggtactcggctcaggcccttactgcactttcgtttataccgcggaaagcccacccgtagtcgcgatcaagcatgatggggaaagcgggggcgccaagggggttataaaaattcatggcaagttggtacagctgtccagcgaaccaactcaaggctattctgcgctctttggcggggcctccctcgccgccgaaagcatcaacgtcaatgtagcgttggggaaagacggggccgtgcaaaagcctacaggcgaaaaatctatcgcagatctgaattttgagcttgatcagggcctgatgattggctatcgcggatggtacgcctgcgagaaaccgccgcggagttaagtactaacgcgtcacgcaggtcgacgggctccacatggaggcgcagccggctctccacgcccgtttcatccccatagacccgaagcaaagaccacccatcgcggcatagcaaggctgaaaaaaacgcgacgttgcgctaccggcggttgtaggacatagctggctcgatcctcctcaaggggaatgccttgcgctttgagggtgagcaagtctatctgctaaacgaaatgctgctggacacagatcgattcgatcttggctattgcgagtttcgtatgcgcttttttgataagccttgtacgtctgatatcaagcgcgcgaagtttcttattgttctccccaagcggctctggcacaccaatctcggttgtgccagagcaggagtagataggcgttacgcagccatgcgctcgcattcttcagcgcacttcatacacgctttggcacactcttggcagtgatccacttgatgttttgcgcattcctctccgcatgcacggcagatcttggcgcaaagagcacaaaattctttagcgtactcactttcgcgactcatcagtgtggcggccaacctacaaatgtccgcgcaatcgcggtcaagctcgatgcagcgagccatcatttttacgtcatcctcacgcaggcaagcagaggcgcacgtttcgcatactagggcacagttcgaacaagcttggatacaggaagcgaacattgagtttgtcattgtgttctccaggtttcgaaagttgtatgtcgccggtgcctactagccgaatacacccataagcgtattaagcaggcacaaaaaatacgacaggctcctatctaacccgtttcgaccaacttcattacaatgctgtaaggttcgtccaaccgcaccggggatctatgcgggcgcggttggggggcgacaagccaatagattgcctggccggcttcgctagcctgttctagatgatgagtggggtatggcaagctccctgtcgccacgactgggagcccttactggggaaccgccggagcgaaagccgcttaactacgtgagttactagccctgcggcctagcgtcttgggaatcaatcgcagagccctccggtaccgttgcgtcgactaggatggcctagggccgccccctctgcttgtgctgaggcgcctttctaagagcctggtcagaaccgcgtaggcacacataccggatgttagtgctcgtgttgcttcccgtctgcgtgcacatggttttctgaaggggatttgccttcggcatcggcatcggcactgtcactgccattgctgtgctctaccgcctggggctcgtcggaagcgtgatggtcatcgctttcgctatcaccatgatgcccggagcctgattggccggttgctccacccgagctgctagagccatggtgatccgagctgctactgttgtcctgatgatgatcgtccgtggtcatctcaccatgttgatcaccgtgcccagctggggtctccccaccaccatgctgatgaccaccgctagacgcaacgagcgctcgatacgctccttcatctagctcaggaagcttctgcaggaaagccaccatcccccatatgtacgggtcagccatgcttttaccccacgcaggcataccagtggccttgatgccatgcttgatgacccaaaacgtctttgctgggtcatcgtatagccctgcttcagccaagctgggtggagcgggatagaggcctttgcttaactcggtctcagccatgcctggcgccaaatgacaacccacacacatcgagtcgtagttccccgccccggcgctgatttggccttcatcgtcaagggctggcacggctatgtcttcggagcgaaccacaatcgagcgattgcgagcagtttccaggaaagcgtgaaccgctccggtatggggatcatccgctgcaacattaaccagtcctgtaaaaacaacgccggccactatcaacaggcctaatgtgcagaaggcaccgaagctaataattattcttttcatcgaaggtccttaaaaccagagcctaacgccagcaacgaaccgcgcttcatctgcatcttcgtcttcatctctcgccatatcagcggtattgccgtatgcccggctccaggtgacaccgatgtacggtgcgaactcacgaacgacttcgtatcgtaggcggagccccacctctgtgtttgcaagaccagcgcctactccgcgagctgggtcgtccttgccatagaaattaaattcggcagtcggttggaggatgagcctgttcgttagaaggatgtcgtattcgccttctaagcgtgctgctgtctgcccgccttcaccgacgaaggcggtggcttccgcctcaaatccatacagagccatcccctgaaggccgaacgccgcccacgtttgcggagactcgggcttaaagtcccggcgaacacccgctaccacatcccaccaagggcttattgcgcgcccgaagagcgcctggatctcggcatcttcagtaacgccattcgttcgctcaccttccgagcgaaaccagaaccgattgatatcgccaccaacccaggcggtagcttcccaactaagagtgctaccttcatctgcgtcctggtactcaagttgatctagcagaaggaaccaggccagatacttgtcatggaccgtatgaccctgaagaccagggaaagccgcttctctatccgcatcggtcaatattggaatgaacgagggatgaaccatgccaggcatttcgagcgtatcgtcatgcttcatttcgccatggttcatcttgctatgatcgatcgcaccatgacccattgcggagtggtccatttgcccaccggagccatgattcatagctgcgggcctggctgaagatgcaggggcttgagctgcctcagtaggagaggcttgatgcatcgagtgatccatcatctcggcggcgttggctgtccctgcagccgctgcgctcaacgaaactccgagcgcaatcagagcaaagcgacaagatctaatggtcatggtgtgaatccaccttagcaccagtagccttcgggtcatgacccattttgccgtggtccatatcaccatggtccatcgagccatgatccatgtcgccgtggttcatttcggaatcagaagtttctggtgcctgagatgccggcttgttgaccgggttttgcgacgaagccgatgattgcttgtgttgatcatgtttttgatctgcaaacgcagctgacatattcattatgcccagcaaactgaatataaacgcgctgccgataagagtcttacgcttcataaaatttcccatataaagttcctcttactcatccactcggacttcacgaaacatgcccatttccatgtgaagcagtaggtgacagtgataagcccaacgcccgagtgcatcagctgtcacgcggtagctgcgctttgaacctggaggcatgtcgatcgtgtgcttgcgaaccatgaagtttccgttctcatcttcaagatcgctccacataccatgcagatgaatcggatgggtcatcatggtgtcgttaaccaacgtgatgcgtactcgctcgccatatttgagccgcaggggctccgaatcagagaactctatgccgtcaaatgaccaggagaacttctccatgtggccggtgagatggagttcgatcgtccgacttggctcgcggccgtccggatccgggaaagtgctgctcaagtcgccataggtcaggactcggcggccgttgtctcgtaagccaataccgggatcgtttagcctatgagtcgggctcatggtctgcatatccaccagtgggttattggactctgagggcgggtgcgattgcatacctccgctcatacccgccatcccagagtggtccatccctgacatcccagccattttgctgtgatccattccggacattgcgcccatgccgcccattccctgcatgtcaccgtggttcataccggacatgttgctatggtccatcgcacccatgtcgccctgcatgccgccgccatggtccatgcccgccataccgcccatactgccgtgatccatccccatatcgtccatggtgattagcggtcgaggatcggtttctggaacaggagcgctcagcccttcggcaaccgctagcgtgccacgggcgtaccctgtgcggtccatcgattgggcgaagatcgtgtaagcctgctcggttgcaggctcgacaatcacatcgtaggtctctgccacggcaatgcggaattcgtcgacgctaacggggttgacgtattggccgtcggctgcgactacagtcatcttcagccctggaatgcggacatcgaaatagctcatggccgagccgttgatgaaccgcagacgaagcttctcgccgggcttaaagataccggtccagttcccgtcgggtgcttggccgttcattaagtaggtataggtgtagccacttacgtcggcgaggtcggtggggctcatcttcatctgagcccacatcttccgatttgcaatcgttgcggcccacccgtcttcgctcacatcgttaatgaagtctccgacagtgcgcttatggaagttgtaataatcggactgcttcttgagcttagaaaggattcgagcaggatcctcatcggaccaatcagtcaacatcaccacatagtcgcggtcatagctgaacggttcgggatccttcgcatcgatgaccaacggaccatagacaccaagctgctcttgtaggcctgaatgactgtggtaccaataggtaccgttctgtttaacctgaaacttgtagacatacatgccatcgggagcgatgccgtggaagctcagtccaggcacgccatccatgttggccggcaggatcatgccgtgccagtgaatggatgtatcttcgctcagcttattcctgacccgcagcgtgaccgtatccccttcacgccaacgaagaagcggtcctggaatagtgccgttgatggtcattgccgtccgagccgcgccggtgatgttgaccggcgtctccccaatcagtagatcgaactccgtgccggttagtacgctgggctggccggggctactcactgcccagaccggagctctccacaaaccaagaccgccaaggaggcctgcggcagtcaagcctttaacaaaggttcgcctagaggttttacgttgcatgtgtacgttccaatcaagctaaggagccaagccgaaaccagccctgagggttgatgttgccagcgttaattgatcttaaaagctcgggcacggtgtcttatcaagcgactcgcctttattcgtaaatatggcatgcctgagaaagatgcgtgattacatttttgtaagcttaaaacgcatcaaaagcgatcaagaaatcacctgaccacgtcgatttctgtatggaggctgcgcaatagctttaccttgggacggaacttttgatttatttgaaggatgtggctgcaatgatgctcattgaaagtcgaacatcagaaatctaatagcggctgccttccaatcactatatttcgaccacgcttctattgtttccaatttatgtcgcatagttggcgatgccgcttaaaaatgtgagcggctaatacgacttcgctagttcttccaactgaggctgcaagtggcaacaccatggcagctacaacgttcgtagaagctgccatagttaccagagccgcatggttaaatttgcataaggcttcgcattagcagttagcgtgagcgtgcttcgttgaagctgcctttgagactacctcctgagattggtccttcttgtcagcctgataactagcgatcgctagctggcgagcctgctccagacgagcaaaggtacgatcaccaccaccctctgccatcgcataggtagagcttgccgcgatggcgagcagtacggaaagaaatctgaaaagtttcatcgcttgttacctcgttgaaagacatgaactacccagcaccgctctaagcagagtcttgggctagggcttgtgtctaagctaaccgagcgttcctgtcagatccctgatctagacattacggtttcgtcagtaatgcaggcaagcagttagcgaaagcgaaagcgtgtatgcgcttttcgttctgacaataggccttgtttcctgccggcaaaaaaaaggcgccatctaggcgccgataggccaaaggagcatggaaaaggccaaaaagcagagtgtgggagcaactgctgatgtagacgttagcgctacaagctgtcagacagatgatgcgggcattacgtttctgtaaggtactggctgcaagatctgagagtcggcacactgtgatctcaatgcaggcggagtactttcaatgaagcttcttgttgctgaagatgagccgaaaacgggcacctacctacagcaggggctcactgaggcgggcttcactgtcgatcgggttctgaatgggaccgatgctgctcagcatgcgcttaatgcggcatacgacctgctcatcttagatgtgatgatgcctggtttggatgggtggcaggttttacagaaagtccgcgcggccggtaatgaggtccccgtgcttttcctcaccgccagagatggggtacaggatcgcgtaaaggggttggagctgggcgctgatgattatcttatcaagccgtttgcattctccgaattgctcgccaggatccgtacgttgcttcgccgcggcaaccatgctcccaaccaaacgatactcaagctcctcgaccttgagatggatctgctgagacgtcgggttacgcgcttggggaaacgcatagacctaactgcaaaggaattcgcacttcttgagctattgcttaggcgtcgcggggaagtgctctcaaagtcacttatcgcctcccaagtatgggacatgaacttcgatagcgataccaatgtaatcgaggtggcggtacgccggttaagggcaaagattgatgatgagttcgagccgaagctgatacaaactgctcgcggaatgggctatctgatcgaggcgccaggcttttaaaaatcacgctatttagcgatttgcgatatggccaatataactagcgggccacctctgctaatccgtggcgtactgctttgtgctgctcggcggatcggccaatgcatattcatgcgtaacttaagaggccttaattagacctcttattgaaaccagagggatctaagctatcactggatccagctttcgacctcatccgttccatattctgctttccagcctttcaggaccttgtgattgccacctttggtcgcaactatttcaccgctgtgagggttcttgtatgtcttgacctgacgagcacggcgtggtgtcgggccttgctgaaccggagcgcgacgagtcccaaactgcgggtcaagaatattgatcaaactaggtagagtaatgctgtattcacccatcagcgagcgaagcttatcttcaaattccatatcctttttaaggctcttgtcgtttctcatggcctcaagttcggccatttgcgacttcaattgctcttccagtttacggtactctgccagtcgggacatttatcattacctctaaggtcagtgtttagacattttggtccatatgatatcaatactttcaacttcaagcatggcgtgacgaaattcggtgggatgtttgcgtaccccgaggctgcgggaggaatgaaggaggtccgcaggtcgaagcccgagctcctaagtgaccagcaaatcgccatgacatgggtcggtatgtgtacagcgaaggcctgtggagtaacagacgctagaatattcaagtgatgcgaggaagcagccttcgaagcgtggccctacgatgacaaaatctgcaacggtggaaggtttatcatccggcgcgattccgaagaacagacccagcagacgatttgcgagctgatcgtaaacactcgctggcctcagagcgggtgcatccgaatcccgcgaaactgcttaccgtagtgagcttactctggcgggaaattctggtagccaaccgtttacgctctttgggtgttgagatttgtcagaatattttggcaaaaatcctgcatctaatcgttctcaccatgcgaattgtcgaaatattattatctcaatgctaacttcaaagcgggcccagcccctgatccaaggggctgaaattgtcagaattatttgtaaaccaccaagaagtgttcctcagggataaaaactgtctctgggggataaaacctgtttcaaggtctggtcacgaaggctagctcgttcggccatcgctatttcggatgtgatagatgttatccagtttggtcgtaagacctcaggcaggcgagacgataaattcgcttctagctagagacagaattgtcagcggttcggttagtagacattttcacgatgccaaattcggcataaaccagtggcatataaataagcaaagcattgccaaactatccgaactaaatactggaaccacagctaatagcttagaattgttgctaagctcttgcactgggtacgatgtccatgcttatttaactacaggtaaaaacgtagaatatttgtccaattacagttcagccaccagatccgttagaaactcctacatagctcaccatagcattaaaatctgccttagatgctctaagcacgacatggaacaaaacggatttagctattggagaaaagtgcatcagtttcatcgtgtaactgtttgctcacactgtaatgtacgtttggtagataaatgccaagcatgtgcaaaaagtttttcaatttttaatgaaaccgatgacggtttttggcataactgcaagtgtggtctgagttttaatgattgggaagaatttgaaaaatttgatattaatgagcaccgttactcaagttttatagcgggtatttatcaaagcgagaaaagatggctaggcatcggtttcgaagggctcgcggactacaccacttcacagcttggatatgacaagaattatctactagaattaaaaaaacgagctatttcggatatccagcgaagcttaattggtaccaaattcaattcattagaagatgagctttctgttagtttgagggtgttacatcttctctttgggagctttgagaaaatgcatgaatttattggcaaaataatctttctagatgactctgctcctattagctcagtgaatgataagagcaatatgcggggcttatgaaatcgtcgtgtactcactct

SEQ ID NO: 19 - DNA, 455871 bp, Pseudomonas sp.
tgcagttttgtttcaatccatggttcacgctcgcttcgcaccgttgcgcccagcaagccttctttctatcggcggcacccgcgccagtagcaggacagcagcaaccatggcgtaaagcgcccaccgctcagcgtcggatcggacgacccacaacatatggagcagcactatcaggaggatgggataaaccattcgatgcagctttttccaacctttacccagcctacgcatgctccatctggtagatgtggcagcgagcgccgacaggcccagcaaagcaatcgcccccacggcgatatagggccgctcgaccaattcagccgcgagcgcggtgaaatcgagccccagcaagaaataaagataggccgagacgtgcagggccgcataggcgaaggaccacaaacccagctgtcgacggaacgcgacccagcctggccaatgagttaaccgctgcaatggagtcatagtgagtgagcttagaagcagaaccaacgcaccctgccccaagttgtccaccagcacttttcccggatccggccccaatgcggcgacagctccgagatacaaccagtagcacggcacgctcgccgcggtaaggaacagcagcaatcgccaccaggggtagcgcatcaatattccttactcagatccattccggcatagagattcgagacctcatcggcataaccgttgaatagcagtgtctccctcacgttaggactgaacaagctaccgggtagccgtcgctccttcgcctgcgaccaacgcggatgggagacgtcaggattgacgttggcgtaaaacccgtactcttgaggggccatggtctgccaggtggtcgctggctgatcttccacaaagctgatgcgcacgatggatttgatgctcttgaacccatacttccatggcacaaccaagcgaagcggcgcaccgttctggtttggaaggacgcggccatacataccgaccgccatcaccgtcaacggatgcattgcttcatccatccgaagaccctcgacgtagggccaatcgatgagcgaaaagccggtacgcattccaggcatctgctcgggccgtaccaaggtctcgaagcgcacgaacttggctttcgacgtgggctcgaggcggcgaatcaactcagccagaggaaagcccaaccacggaataaccatcgaccacgcctcaacacaccgcaaacggtaaatgcgctcctcgagccggctcggcgcaagtaaatcctctacggagtagcgtcccggcttcgccacttcgccatctaccatgacggtccaaggttcggtcacgagtttcggcgcgtgggcggcgggatcgcctttatccggtccgaattcatagaagttgttgtagtgagtggcatcccgatacggcgtgatggcctcaccctccacaacggtggcctgccacttcgtgtcgccgagcttggcgtcgaaccaagcgggagcatcaacggcgtcgacaccctcgtaacgcccctccgccgccgacgccagcgacggaaacccggtggccgctacggacaacgcagcgccctgcagcagttgtcgacgattcagatagagcgattcaggggttacctgcgattcgtagcagtcgctgcgccgaggaatcttgataagcatgatgtgctccgctgcctgttggccaggcatccaatagacagcggatcacctgataaatcaactttcgacgcgcttgcgacgacgcatcaggaattgcacaggcccggataccgcgtaagcgagaaagatcaacagcaggatgcgcggcggatcgctgaatacgactgcgaagaccagcaccaccaccaagatcgctacgaagggcacccggcctttgagatcgaggtctttgaagctgtagtacttgatgttgctgaccatcagcaaccctgccaatgccaccagcagtgcaaacagcatgaccaccgcgataggcaaatccacaccgcggatgccgggctcatccagcgcccatacagcccacactgagcctgcgaccacaccggcggccgcagggctggcgagaccgataaaccagcgcttgtcgactttgccgatctgggtattgaatcgcgcgagacgcagcgcggcgcacgctacataaatgaatgcgacggtaagcccgacattgcccagccccgacagcgcccactcgtaggccagcacagcaggcgccaggccgaaggcgaccatgtccgacagcgagtcgtactcggcaccgaatgcgctctgggtgttggtcaggcgcgctactcggccatccaggctgtcgagcaccatcgccacgaacaccgtggcggcggctacgtagaagtttccgttgatcgccgtgatgatgcagaagaaaccggcgaacaaattggccgtggtgaatagattgggaagcagatagatgccgcgatgacgcaccttgcgcccctcggaatcctgaatttcttcgacatgctcgtcgatcggcagcaagctctccggctcgactggcttgttcggctcttcgggatgctcactcatgtagttttaccttactgcaggtgtgaataatttcgacagaccctgacaccacgggttcagccaggcgccagcagcgctttttataccagaagccagcagacctaacgaaaaaacgcggccgaagccgcgttttattccagcagagcctagatcagttcttgctcttatcgacgatcttgttggcagcgatccagggcatcatggaacgcagcttttcaccgaccacttcgatgccatgagcggcattgttgcggcgataggcagtcatcgacgggtagttggcagcgccttcggtgatgaacatcttggcgtactcgccgtcctggatgcgcttgagtgcattgcgcattgcagcacgagattcagcgttgatgacctcagggccagtcacgtactcaccgtactcggcgttgttggagatcgagtagttcatgttggcgatgccgccttcgaacatcaggtcgacgatcagcttcagctcgtgcagacactcgaaataggccatttccggcgcgtagccagcttcgaccagagtttcgaaaccggctttaaccagctcgacgcaaccaccgcaaagaacggcctgctcaccgaacaggtcggtttcggtttcgtccttgaaggtggtttcgatgatgccggtacgaccgccaccaacacccgaggcgtaggacagcgcaacatttttggcgttaccggacgcatcctggtagatggcgatcaggtcgggaatgccaccacccttgacgaactcggagcgtacggtgtggcctggcgccttcggcgcgatcatgatcacgtcgaggtcggcacgcggcacgacctggttgtaatggatcgagaaaccgtgagcgaaggccagggtcgcgcccttcttcaggttcggctcgatctcgtcacggtacaggcggccctggaattcgtccggggtaaggatcatgaccagatcggcagccgcaacagcggtagcaacgtcatcgaccttcaggccgtgagcttctgccttggcaaccgacggcgagccggcgcgcagacctacggtgacgtcaacgccggaatccttcaggttgcaggcgtgagcatgaccctgcgaaccgtagccgatgatcgcaaccttcttgccctggatgatggagaggtcgcaatctttgtcgtagaaaactttcatggaattacccctgttactggccggtcgggccattcaataaattggtttagatactcagcactttgtcgccgcgggaaattccggtgacaccgctgcgcaccacttccaggatcgatgcggtaccgacggcctggatgaaactgtccagtttgtcggtcgtaccggcgagctggatggtgtacacgttggccgtcacatcgacgatctggccgcggaaaatgtccgtggtgcgcttgacctcggcacgctgcgcgccggtggccttcaccttgatcagcatcagctcgcgctcgatgtgagcgctttccgacaggtccaccagcttgactacctcgatcagcttgttgaggttcttggtgatctgttcgattacctcgtcgtggccagcggtggtcaaggtcaggcgcgacagggttggatcttctgtcggcgcaacggtcaggctttcgatgttgtagttacgctgcgagaacaggccaaccacacgcgacagggcacccggttcgttttccatcagcagggaaatgatgtgtctcatgatcaggtccgctccgtcttgctgagccacatgtcgcgcatcgcgccgtctttgatctgcattggatagacgtgctcgctggtatctacggcgatatcgaggaagaccagtcgatccttcatggcgaaggcctcttccatcttcggcttgagatctttcagatcggtgatgcgcattcccacatgcccataggcttcgaccagcttgacgaagtccggcagcgactccatgtaggagtgcgagtagcggctgttgtattgcatgtcctgccattggcgaaccatgcccaacgcaccgttgttgaggttgatgatcttcaccggaaggtcgtactgcaggcaggtcgacagctcctggatgttcatctggatgctgccttcgcccgtcacacaggcgacgtcggcctcggggaagttgagcttcgctcccatcgcggccgggaagccgaagcccatggtgccgagaccgccggagttcagccaacggttgggcttgtcgaacaggtagtactgggacgcgaacatctgatgctgaccgacatcggaggcaacgtaagcctcacccttggtgacttcgcacagggtttcgatgaccgcctgcggcttgatgatggtgccgtcacccttgtcgtacgggaacagaccgcgattaccacgccactcctcgatctgcttccaccagctggcaacggtatcggcgttcggcgcctgaccaatctccttgacgatggcgaccatttcggtcagcacactgtccaccggaccaacgatcggaatgtcggccttgatggttttggagatcgacgccggatcaatgtcgatatggatgatcttcgcattcgggcagaacttggtcgcgccattgatcacccgatcatcgaagcgcgcaccgaccgcaagaatcacatcggagtgatgcatcgccaggttcgcggtatagctgccatgcataccgagcatgccgacgaactgacgatcgctgcctggataacagcccagccccatcagtgtgttggtcaccggcaggttgagcatcttcgccagttcggtgagctgtgaagacgcgccccccatgaccacgccgccaccggcatagatgatcgggcgcttggcagccagcagcagctcagcggccttgcggatctgcccagaatgcccacgaacagctgggctataggaacgcagcttggcttttttcggatagacgtactcgaacttctcggcagggttggtcatgtccttcggaatgtccacgaccaccggcccagggcgaccggattgcgccaggtagaacgccttcttcatcacttcgggaatttccgaaggatgcttgatcatgaagctgtgcttaacgatggggcgggaaataccgatcatgtcggtttcctggaaggcatcggtaccgaccatgttgctggcgacctggccggaaatcaccaccatcggaatcgaatccatgtaagcggtggcgatgccggtgatggcgttggtagcgcctggccccgaagtgaccagaacgacgccggcttttcccgtcgcgcgggcatagccgtcagccatgtgagtagcggcttgctcatgccggacgaggatgtgcgtgacttccttttccttgaacagcgcatcgtagatgtgcagcaaggcgccgcccggatagccgtagatgtacttaacgccttcgtctcgcaagaagcggacgaccatttcagcgccggataaaagttccacgttgttcacctctagaacgccagatagccgccccgcgtcggaccggccagaaataggtttactgccagacagtgcatgagcgacggtggtcgccgactacgtcagctgctgaactagcgagtattagggaagccccaaagtgttgcggggcgcccctcccagcgcgaggtaacgcgttgcgggtgttacaagtcggcgcgggtgtgcacctcatgattgaccgaaaggcacgcttgcggcggcgcttcggaacagcaagcatggaattgttcggattaggctcagtcaagtcaagtctgctgttgggcttgcagctgtttcagctgtgatccagcgcagaatgggagtgcctggcttttgcgtatagtagcggcttggtattgcatccacagaagggaatagcatgcgtttgacgattcttgcgggtggcttgctgctcgcattgagcagcagtgtcatggctgggcagatttacaagtgggtggacacgcaaggcgttacccacttcggtgcgcagccgccgcagggccagtccgtcgaggcgatcaataccgctacgccagcacccaagcccgtagccccggagcccgttgcagccgacccctcgagcgagacgcagcagcacgagatcgatcgcaaggtgaagaaacaggtcgccgaacaggaagcagaacggcagcgctactgcgtcacgctacggacgaatctggcgcaactgcaaaacaatccgcgggtgcgtgtggaagaggaaggcgaggtgcgccgcctgaacgaagaagagcgtcaggcgcgcatcaaagaaacccaacagaaaatcgccgacacctgcgactgatccaaccgttcgctgctggcgcggcgactgcggctatcgttctagccgcgactgatcagcacgtcgaacgtttccagcgcctgcaacaggccggccatttgctgcgaccggccctgatagacgacttccgccatcgccaggattcccgagacggccggcagcgtctcgccctgctccaggatacttttcatgcgaggcagaaaaatccattggagccactgctcgaacgataacgtgtcgacgcagaacggctcctggctggcgagcgcacgggggttcggtgggaacgcgtcccagagcgcatgcactcgcagctcacgctcgatccagagcagctgatcggccagttccgcgacacgagggtccattacatcgccaccttggcgcgctcacgggcttgtgcggcgcccgccgcgttaccttgacgctcacgtgcctgcgcgatcagctcccagagactcgcctgcaacgcgggacggccgctggcatagctcaggcctcggcgggaaagttgctcagcctgaacggcatcgccctgagcaagacggacttgagccaagcggtagagcacctgcggctcccgaggggcgattcgctgggcgcgctcgaggctggatgcggcgccgttcaggtcaccgccgccttgctgctgctgggccgtggtaagcagggccagtacgggcccatcgagccgctcgtctgcggacagggtgctgctattgccattagaaggtatgccggtcggcatcgatggggccggagctggcgccggctgcggagcgcgccattgcgtgggcgcctccggcgccgggctgggcgcacccgagaagccggcatccggagccgcgaaggtttgcagcggctcggagttctgctgcggcaccataaccatcacgccagaatcttcgggcgcgggacgtgccgctggtgccgccggggtcgcggtccgataggtctgccgggccgatacctcctcggacaccggcgctccggagtcgacgacggggatagcgcctcgtttaaccgtcgcgcaaccctgcagcaacagagcggccgcagctaccatcatccagtgcttgttcaattcgaacctcatcaagaattcactcatttaccattgttcactgcagccaaccacgcacccagtccatgaccgattccgcaggcgcctgaatgccacagcctgaccccagcgccggctcgctcccgcggatgtagggaacctgcatggcgccaggacagttctccgaagttccctggcccgtttgcggatccacccagaccatctcgacgttatccggaagcgcgctctgcagcggtagcgggtcagcacgacgcatgaagtcggcccagatctgcaatgcgccagtggcgccggtcagcgaggtcttgccgttatcgtcacgccccagccagaccaccgccagcagatcctggctgaacccggcgaaccagctgtcgcgcgaatcgttggtggtgccggtcttgcctgccagcgtcagcgacttcggcacgtaattgtaggccgagcgcccggtaccttcgcgcatgacgcgctgcatggcgtactgagtcaggtagatcgcacccgcatcgaagcgctgctcgatcttgaacggatagcggctgagcggctcaccgtcagcggccacaacgctacggatagcgcgcagaggggtattgaaaccaccattggcgagcgtctggtagatgccggcaacttcgatgggccgcagtgcgcccgcccccaaaagcatggaaggatacgccggccattgtggcgaagcgcccaggcgttcgagcgtcttcaatacatgaggcacacccagctcaagccccagccgcgccgtggacagattgtaggaatttgccagagcctgatagaggtagacggtgccgtgagcggtgcgcccgtaattctgcggcttccagacctggccgtcggcccccttgaccgagaatggctggtcttccaatcgactggtcagcgtgtactgactgggcttctccagcgcagccaggtagatggccggctttatcagcgaaccgatggggcgcgacgcgtccagcgctcgattgaagccggcgaatcccggctggcggctacctagcatcgcttgcagctcaccggtttccggattggtcaccagcattgcgccttcgaccccgtcagccgctttaccgaggcgtttcagcgtcccggtcatggcgctttcggctttgcgctgcaggatcggatcgaaactggtgaacacccgcagaccttcttccgtcaggtcctcatcacggtaatcctcacgcagctggcgcttgaccagatcgagaaatgccggatatgaactattggccagactgccctgagggctaatgtcgagcggcgacttgcgggccgccgcagcttgctcggcgtccagcacaccctgctcttccagcaagtcgagcaccagattacgacgctccagcgcccgctccggatggcggcgcgggttgtaataggtcggtcccttcaccatgccgaccaacagcgcaacatgttgcaccttcaactcggccaatggccgtccgaagaaatactggctcgccagcccgaagccatgaatagcccgatttccatcctgaccgagaaacacctcgttgaggtaggcctcgagaatttcgttcttgtcgtaatgcagctccagcagtatggccatcattgcctcggtcgcctttcggctgaggctgcgctcgttggtcaggtagaagttcttgaccaactgctgggtcagcgtgctgccaccctgacgtactgcgccggcggtgagattgacccaaacggcgcgcgcgatggatttgagcgaaacaccgaaatgatcgaagaagtcccgatcttcgaccgccaccaatgtatcgaccagatagggcggagcctggtcgagcttgatcaggatccgatcttcgttgtgcgccgggtacagcccgccaatcgtgaccggttcgaggcgagccacaggaagttccccgccatcggcgcgtgtcagaccggcgacgaagtcaccggagaagcgcactcgaatacgctgtgattcctcggctccttcgtaaaaccggaacccgcgggtatgcatttcaaccgcattggccgccaccgacatgctgcccggcccactgaccgtcttctcgcggcgatatcccagcgcgtcgagctcggtgaggaagtcgtccctggccagcttctgcccgacgaaaagctcgagcgggcgcgcataaaccgtagcgggaatcgtccagcgcttgccggaaaacttctcctgcaccacggcatcgagataaatggcgacgcccgcgagtatcaccagggcgacaatggatagcttgatgatccagcccagccaggggcgggaaccaccggaacggcgcttggagcgagaacgagaggagcgtgctttagtcatggcggcgcattatacgcactttgaactgcccggaagacggcctcttggcggtttgcaggcccggctcgggcggacataatggggcactttttcgagcctgtgacctgcatcccactgcgtcacgcaccctgcctactctttacaaggaatgaccgtgagccaagcattgattgccgcgttgcaaaatccggccctctatccccatccggtcgacggattcagggtcatcgaaacccatatctcctgggtaatcctgaccggcacctacgcctacaagatcaagaagcccgtggacttcggcttcctcaacttcactgacctggcgtcccgcaagcatttctgcgaagaagagctgcgcctgaaccagcgcatggcgccggacctgtatctgcgtgtgctgcccatcaccggcagtgtcgacgcgccggtgatcgacggtgacggcgagccgatcgaatacctgctgcaaatgcgcgagtttccgcaaacgcaattgatggccgaagtgcaggcgcgcggcgaactgaccgacgcgcacatcgatgccctcgccgagcaaatcgcccggttccaccagaacacgccccgggttgcagccgagcatccgctgaacagcgccgaagcgatcgttgccccgatgcgccagaatttcgaacagatccgtccactgctcagcgaacaagccgatctgcagcaactcgacgcgctgcatgactggaccgaaacgaacatcgcgcgcctacagccgttgctgcagcagcgcgcccagcagggcttcatccgcgaatgccatggcgacctgcacctgggtaacgccacgatcatcgacggcaaggtggtcctgttcgattgcatcgagttcaacgagcccttccgcctgatcgatatcgcctccgacgccgcattcctggcgatggatctggaagaccgtggcttgaaatgccaggcacggcgcttcttcaacggctggctggaacataccggcgactatgccgcactggaattgctcaacctgtacaaggcctacagagcgctggtgcgtgccaaggtcagcctgttccgcctgcatcaggagcaggatccggtacaacgccgggtgaccctgcgccagtaccgcagctatgccaacctggcagaaagctacagcgccatcccgtctcgtttcctggccatcacccacggcgtatcggcggttggcaagagtcaggttgcgctgcgcctggtcgaggcgctgggcgctatcaggctgcgttcggatatcgagcgcaagcggttgcacggcgagcagagcgaacccctggcggaccagctggacgccggtatctacagcgaacaagccagcgaagccacctacctgcggctgcattcgctggccggagcggcgttgaacgccggcttctcggtggtcatcgacgcaacctatctcaagcaacagtaccgtcaagcggcctggcaggtagccgaatcgaccggcgtaccgttcatgattctcagctgcgaagcaccggatgctgtcatcgaacagtggttgacccaacgtcaggccgaagggggcgacccgtccgacgcgaccatggccgtgatcaaggcgcaacaggcatcccgcgagccgctgagcgaaagcgagcagttgctcagccggcaaattcgcacgcctgaagccggcagcctcgacaatctggtcagcgtcatccgccaacggctccccgggctctaatccggcccgtcagcgaatcttcaagcgcaacgagcaccgccgcgggcagaacccggtagtgcctctatacttgtacaggtccgcctgtggaagccgaccatgtcacactgcgttctgccatcggggctaatggactgtcgccatgggtgacagtgtccggcttttctcgattcgtcccgacgattacgcccagtttcgcccgacttatcctgacagcctgttcgactggctcgcccaacagtgtgagcacactcgacgtgcgctcgatgtcgccgccggcagcggccaggcgacgctcgcgctcctgccccatttcgagatggtttgcgcttgcgacgccagcctcgatcagctcaacagcctggcagactggagcggtgcatggcgtttcgccgcccagagcgaacgactgccgctgcgcgacggcgtgatcgacctgctggtggttgcgcaggcgctgcactggttcgcaacgcccgcttttttctccgaagcaaaacgcgtgcttgctgccaacggcctattctgcgcctggtgctacagccttctgcggatcgagccgacgctcgatggcgtcatcgaccgcctgtatggcgaaaccctgaagggctattggcctcccggccgtgccagcgtcgacgtgggttaccgcgacgtccaggcgcccttcgccaccatcgattctccggattttgctatcgaggcgcactggaccctgccgcagttgctcggctacctgcgcacctggtctgccgtgaagcaatggcagcaagtccacggacgggatccggtgacagagctggagcccgaactgctacgactgtggggcgcgccagggcagcaacgttgcattcgctggccgcttcatgttctcgccggctatccgggccgataggagcgatcatgcacgacgaactgctgacgctgaggaatctcggcaagacatccgcccaatggctgcatgcctccggcattcatactgcggaggacctgcgccggctcggcgcggtcggcgcctatcaggcggtcaaggcacgcggtttcagcgcgtcacgagtgctgctctacgcgatcgagggtgcgctacgggacgtcaattggaaggagctgcccgcagcgctcaaaagtgagctcaatcatcatctggcaagccaagatcaccgagaccagagctagctcacaacctcgacacggcgcgatttactcgcgtcaacggcagctttatcgtgactacgcgcactgctcgatctctgcgagctcgcctgtcaaggattgtcgtcatgtatctactcggggaacaaccggcgtacgccgaccagctgatcaaccgcttgcagggaatccccgcgcaattgctggaaggcctgacgccctccgcatccgctctcgaaatcaaaggcaccgatgacctggaggatgcgctacccaagcaacagctattcatcatcgagagcggcttgctgcatgccgtggtggatgacaaatccttgttctatctgcaggagggagacctgcttggcctgcgccagggcatagagctgccgatctgtcgttatcgcagcgacgaagccatccgcctgattccctactcgcgcagcgccgtgtttcagcatattcatgccgatcagcggcggcaggaactctttacccaatacctgatcggccagaccgcgctgttgtccgacgccctcgcgcgactcaagcaacccgagattcaccctacgaccggcttccagcacttcgccgccggagaagaactgatccgtcagggagacgatgcggacaacgtcttcatcatcatcgaggggcacgccgaagcgatcgtcgacgggcagaaagtcggtgatgtgcagcgcgacgagattttcggcgcaatggccgtgtttacccaggagaaacgcagcgccaccgtgatcgccacctcgccctgcaccgtcatgctgattcccaaggaacagtttctcgggctgatgcagagcaatccgaagatcgcgcacagcctcatagaaagcatggcccgacgcatcgatctgctcaacaaggaagtgactcgactgcgtctgccgctcaccgcatagcgccagccaaaagccgtccaggttttttccgaacagctgttgactagataatgagaattgttattattagcaccactggtcgcgagatcagctggtaactggaagcccaggcagtcggactttcaggttatctcctcatcaggctaatcacggttttgacccggctcttgccgggtctttttttgtctgcctgccaagcaaatcgctactcggccttttcgccaaactgggcgcacatatcctgccgtgtctgggcgggagtgaaccagacgaagtcagcctgttccccctgtatgtcctcgccgacctcggcgagcatcagcacccgaacgccgtgacgcgcagagtcggtcatgtgcagcggcacgccgagatcgcgtcgcacgtgaaaggcacccgcaaacaacagcgccggcttgggcgcagcttgcagccgttcggccatccgacggtcacgctgctgctgcacggccaacatggccggtagttgtgtttccggcagcatgtcgcagtgggacacccgaatctgcgcaagcaacgcgcgctgcacaggcaccgcagccgcaaggccagacaaggttggcggatcgcgatagatggccttgacctcgctgcgatccaggttagccgacagcaatggatagggctgcgccaacgcatactcgatcactggcgcgtacagctcccagctccacccccgctgccactgcaatgccgcaggcaaatcctcgggccacacccctcgcctgatcgacgtctgcgcctgggcgacactggcctgttgatccggattgatcatttccatcagcaggctgccttgcgcgcggcgctgcgccaatgcctccagaagccagcgctgcaggttgtgatggtcggggttgtcatgacgttcgccaaccagcacctgatcggcatcggccagtgcggttaccaggcgctgcgccgacaacgtctcgccagtacgcaggtcgacgattcgcccgagatcggcatgatcgcgcccctccgggctctgccagggcgtcagcggtggcgtcgactggcagccggcgagcagcagcagaacgacgagcgagaaggttttcatcgacagttccttagcgtgcaatgaccaacgggtgcccccgctccgggtgtcgctgaataagcacatcgaggccgaatacggctttcaatggttcggcctgcaacacctgctcgggggtgccaatcaccctggcgcacccgtcggccagcaacagcaggcgatcacagtagcgcgcagcgagattgagatcatgcaagatcaccaataccgcaccgcctcgctcggcgaattcgcggacggcgcccaggatgctgtgctgatgcaaagggtcgagcatggccgtcggctcgtcgagcagcagcgtttgcccaggtcgccccggccacagctgcgcgagtacccgtgccaggtggacgcgctgttgttctccgcccgatagcgcgaggtagttgcgccgcgcaagatgctgcgcatcggctgccctcagggcggcggcgacgatatcgcggtcctcgtcacgcccgctgtcgtggggcgatcgaccgagaccgaccacctcgtcgacccggaacgcaaaattcaacgacgaactctgcggcagcaccgccaggcaacgcgctcgctcggctccgctccacaccgccaacgaccgtccctgtaacgacacctcaccagcgctggggaccagttcgccgctcaacgcaccgagcaaggtgctcttgcccgcgccgttggggcccaacacgcccagcacctcgcccggcggcagctgcaggtcgatatcggccagcaccgttgacgtcccgcgccgtaccgagacccgttgcgcacgaagcatcagcgccgcccccgcaacaacaggtagagaaagaaaggcgcccccagtagagcggtcacgatgccgataggtagttccgcaggggcgagcagcaaacgcgccaacaggtcggccagcaataacaagctgcctccggccagggccgaggccggcaacaacaggcggtggtccgggcccgtcatcagtcgcaccaggtgcggaaccaccaggcctacgaaaccgatcatgccagccgccgcaacggccgcgccaacccccagcgccgtgcacagcaccagttcgcgcttgagccgctctacgtcgaaacccagatgacgcgcttcggactcgcccagcagcaacgcattgagcgctcgagcgcgacggggcaaccaacagaccacaccgaagaccaccaccagcagcggccacaatcgtgcataactggcgccgttgaggctgccgaggttccagaaggtcaaggtgcgcagcgtgctgtcgtcggcaaggtaggtgaacagaccaatcaccgcgccggccaaggcggtcaatgcgataccggcgagcagcatcgtggggacctgggtatggccgtcgcggcgaccgaggcgatacaccagcgcggtcacaccaaggccgccgccgaaggcgctcagcgacagcaggtagggctccagccatggcgcaatgccgcccaccacgttgccgccgatgatcgttaccgcagcgcccagcgcagcaccgctggagacgccgatcagcccgggatcggccagcggattgcgaaagagcccctgcatggccacgccggacagcgccattaccgcgcccacactcaggccgagcaaggttcgcggcaacctgatctggccaagaatgagttcggcgggcccagcgtgatcagcgccgaacggagcggcaagcagacgccacatggcgtcgaacgtttcggagagagacagactcaccggccccagcgccagagacaaccagaacgctatcagccacagcaggcccagcgacaggaacaaggaacgtgcagacagtgcagggctcatcggggacgccgccagtcgataatcgacgcgcaggataaaagccagtcaagctggctaccagccctatcggtcactcctactccaacgaccggtacctgggcgatactctggcgcacgaaggaggacatccatgtttcgattgtgcgccaccgccgacatcgccgaaggccagagcaaagggttggaaagccaggggcaacgtctgctcgcggtacgcaaggagggcgttctgtacgtctacgagaactgctgcccacatcgcggcataccgctggaatggcaacccgatcagtttctcgacagcagtggcagtctgatccagtgcgccactcatggcgcgttattcctcatcgatagcggcgagtgcgtggctggtccctgctccggccaggccctgcgcgcgctgccggtcgtcgagcgcgacggcgttgtctggttgcaaaacgatcgatagtgcgacgttgcgcccgggcgacgattcgccgcgttgggtatcatggcgacactgcaccctgtgagatgaccatgcgccgtttgctgagtctgctgatcctgctgtttgcccttcctgccgctgccggcctattcgatacccgccccagcgccaccctgggcgggcttaacaacagtgcggatttcctgcccgtgcgcgaggcctttcgcctgagcgtgctcgacgctgccccaggacaggtcaaactgcgcttcgtcgcggcagagggctactacctataccgtcaccgcttccagttcaaagccagggatgccgacgtcgtcatcgaagaggccaagctcccagccggcaagcagaagaccgacgactacttcggcgaggtcgaggtctattacggtgtgctcgatgtcgacctgccgctgcgcaaccccgcgggcatgccctttaccctgcaggtcacctatcaagggtgcgccgacaagggcctgtgctacccgcccgagacccaggctttcgagatcgacggagccgctgccgccgcgcccgcctctgtccctgcagccggctcgacaagcgatcaaggcacggcgctgtcctggcgctcggtggcgctgttcttcctcgctggcctgggcctgacgttcaccccctgtgtgctccccatgctgcccatcctgtcgggcgtggtgttgcgcgggcagatcggcggcatgcgcgccttcctgctgtcgcttgcttatgttctgccgatggccggtggcttcgccttgctgggtgcgctgatgggcgtattcggcgcggaactcaatttgcaggcacgcctgcagtcgccctggattctggttccgttcgcattgttcttcgtggcattcgccctggcgatgttcggcctgttcgaattgcggctgccacaggtcatgggctcacggctggagcgcatcgcaggtaacgccaagggcggctcgttcatgggtgcggccttgctgggcgcggtatccagcctgctggtctcgccctgcgtatcggcgccgctggccggagcactgctttacatcagcgccagcggagacgctctgggcggcggtctgaagctgttcgcactcggcctcggcatgggcactccactggtcctgttcgccatcggcggcggcgcgcttttgccaaagagtggcccgtggatggttatcgtgcgcaacgtgttcggcgtcttgctgctcgcagtggccgtatggatgctcgaacgcgtcctgcctggcgccttggcgcttgcactgtggggtttgctggcggccggcacggcgctgtttctcggcaccctggaattcggtcagaagacgcccaggcagaagctggcacagttgctggggctggttctgctggtttatgggctggcggcgtggatcggcgcattgcaaggcggctccgatccgctgcgaccactgccccgctcgacctcggcagttgtcggcagcgtcgccagcgaaaacgacagctggtacacggtaaccaccccggaggcactcgacgctcaactcgaagccgcgcgtgccgccggacaaccgctgatactcgactggtatgccgactggtgcatcagctgcaaggtcatcgagcgcgaggtattcgccgatccgcaaatcacgccgcgcctggccggctaccgtctgattcgcttcgatatcaccgacagcaacccggcgcagcgagcgctgctcgatcgctacaagctgttcggcccgccggcgatcctgttcttcgctccggatggacaggagctggctcaggcacgggtcgtcggtgaaatcgatgccagccaattcgcgcaacgactggaccgtgctgaagctggccgctagtcaggtttccttgcagcaatctccagccataatgcaggcatttacgccgatcaagacatgactggacagtcagccctcgcttcgggcatagtttttcctttcgccaatcgtgccccctcgttaacctcgattggctagaacaacaaggaatgctcatggcgacgcttctggtccttcacggcccgaatctgaatttgcttggtacgcgcgaacccggcgtctacggcgcaacgaccctggcgcagatcaaccaggatctggagcaacgggcccgcgacgccggccatcatctgctgtatctgcaatccaacgccgagtacgaactgatcgaacgcatccatgccgcgcgtagcgaaggcgtggacttcatcctgatcaatcccgctgcctttacccacaccagcgtcgcattacgtgacgcgctgctggcagtgagcatcccattcatcgaagtgcacctgtcaaacgtgcacaagcgtgaacctttccgccatcactcctacttctcggatgtcgcggtaggggtgatctgcggccttggcgccagcggctaccgcctggcattggaggccgccctggaacaactcgctgcttcctgacaggcccgtgccacgcacggcctcgaagaagcgagcagcaatgcccttcgaacttacttgggagtcaccgcttcatggatattcgcaaagtcaagaaactgatcgagctgctggaagagtccggtatcgacgagctggaaattcacgagggcgaagaatccgttcgcatcagccgccacagcaagcaagtggccatgcaacagccttactacgcccaggcgccgatgcccgcccccgctgcagctccggccgccgccccagcggccgctgacgccgcaccggcacaaccgaaactcaacggcaccgtcgtgcgctcgccgatggtcggcaccttctaccgcgcctcttctccggaagcggcaagcttcgtcgaagtcggtcagagcgttaagaagggcgacatcctttgcatcgtcgaggcgatgaaaatgatgaaccacatcgaggccgaaaccagcggcaccatcgaatccatcctggtggagaatggtcagccggtcgaatacgaccagccgctgttcaccatcgtttgaaccgcggagagccaacgatgttggaaaaagtattaatcgccaaccgcggtgaaattgccctgcggattttgcgagcctgcaaagagctgggcatcaagaccgtcgcggtgcattccaccgccgatcgcgagctgatgcacctggccctggcggatgagtccgtctgcattggcccagcccttgcgaccaactcctacctgcacatcccggcgatcattgccgccgcggaagtgaccggagccacggcgattcaccctggctatggttttctcgccgagaacgccgactttgccgagcaggtggaaaagtccggcttcgccttcgtcgggccgagagccgaaaccatccgcctgatgggcgacaaagtgtcggccaaggacgccatgatcaaggctggcgttccggtggtacccggctccgacggcccgcttcccgaagatgaagccgaagcgctgcgtatcgcccgcgaagtcggctacccggtaatcatcaaagcggcaggtggcggcggtggtcgcgggatgcgtgtcgtctatcaggaagaagacctgatcaagtcggccaagctgacccgtaccgaggctggcgctgcattcggcaacccgatggtctatctggagaagttcctgggcaacccacgccacgtggaagtccaggtgctgtccgacggccagggcaatgccatccatctgggcgaccgggactgctcgctgcagcggcggcatcagaaggtcctggaagaggcgccagcaccatatatcgacgaaaaggcgcgtgccgaagtactcaagcgctgcaccgacgcctgcgtcgagattggctaccgtggcgccggcaccttcgagttcctctacgaggacgggcgcttctacttcatcgaaatgaacactcgcgtccaggtcgaacaccccgtcaccgagatggtgaccggcgtggatatcgtcaaggaaatgctcagcattgccgccggcaacaagctgtcggtcaagcaggaagatgtggtgattcgcggccattcgctggagtgccgcatcaacgccgaggacccatcgaacttcctgcccagcccgggcaaggtcaagcatttccatgcgccaggcggcaacggcgtacgggtcgattcgcatctgtacagcggctattcggtaccgccgaactacgactcgctgatcggcaagctgatcacctacggggccacgcgggaagaagccatggcgagaatgcgcaacgccctggacgaaatcgtcgtcgatggcatcaagaccaacatcccgctgcaccgggatctggtgcgcgacccaggtttctgcaagggtggcgtgaacatccattacctggaaaagaagctgggaatggataagcactgaacaggtgctgcactgacaagggctgccaatggcagcccttgtcgtttctggcaggtccaatattggaagcctgaaccgccaggcagtaagctcgctcacttttctcggaccgcaacgcaatggcggtcgccaccccatgaggtccccatgtcctggttacagctccgtctcgccatctctccggaacaggcgcaaaccctcgaagacgcactattgggcgtcggcgcagtctcggtcaccttcatggatgccgaagaccagcccatattcgagccggatctcggcaccacgccgctgtggtcacgcactcatctgttagcgctgttcgaatcggacgtcgacgaggccaacctgcttgcccacctggaactgctggtcggtggcccgctacccgagtaccagctcgagcacatcgaagatcaggactgggagcgcagctggatggacaacttccacccgatgcgtttcggtcagaggctgtggatcgtacccagctggcacgccgcacctgagccggatgcagtgaacctgctgctcgaccccggcctcgcattcggcacgggaacccatccgacctccgcgctgtgcctggagtggctggacgcacagccgctggacggcatgcaggtgctggatttcggctgcgggtcaggcatcctggccatcgcggcgctgcttctgggggccgaacacgcggtaggcactgacatcgacgttcaggctctggaagcctcgcgtgataacgccggccgcaacggcatcgatccggcgcgcttcccgctttatctgccggagcaactgccacagggccaggccgacgtggtggttgccaatatcctcgccggtccgcttgtcgccttggcgccacgcatcatcgagcgagtcaagccgggtggtcgtctggccttgtccggcattctgctcgagcaggccgaagaggttcgcgccgcctatacgagccagttcgatctggacccgaccgccgagaaggacggctgggtacgaatcactggcgtccgccgtcgctaatctcaccctcggcaccgagcggggcgtgcaagcacggctgcatacccgccacgtgccgccactgccgctcatcggtgcgcatgcgctagactaccggcatttgcgccggaccaacgcatgaccagtttcatcacccagtgcccccaatgccgcaccagcttccgcgtcagccgcacacagctcatcgcggcccatggtgtggtgcggtgcggcgcgtgcatggaactcttcaatgcagcccgtcatctgcaagaggacgaaaggtcagccggcgccacgacgacctccgccgcgatcggacgcacggatcccgtgcaggcagtggccgcgccgcctcccgccaagccggcaagcaaagacgaaacgcgctggatccacgacgagctagacctcgacaaccttgatctcgacgaggaactggcaaagctcgagcgacaggaactggagctgtctaacgaatcgctcgaactgcagccgtcgtccgctggtggcgcgtcagccgccgcgcagaaccgatcgcgcatcgatgacgaagcttgggccgagcgactgctggccaccgaaagcgatacaccggctaccgaccgccccgtacaggcggaggcagcggcggctggcgcgccgacttcaggcactgcggacctacatttcacgcccgtgagcgccgaacaccctgccccgccgagcccattgaagggcgcgcgcggcgtgctggccgaaccgctcgatgcagacggccgcatcgagccggtgttcgatggcgtggtcgagaccgatgacgagcccctgcacgctgacctgccggctgataacgctgaacgcgagccgacgacggacctggcagcaagccgggatggcaacaacccgctgttcgaactcgacgacgaaccgctgcagctcgactggcaagcgcgccggcggccctgggcccgctggttcggctggggcctgctgaatctgatcgccctgctggtgctcgtcgcgcaatacgtgacctacaactttgacgagctggcacggcaggacagctatcggccatggcttgagcgagtctgcccgacgttcggttgcgagctgccgcccagggtcgacgtcagccagatcaagagcagcaatcttgtagtgcgtagccaccccgacttcgctggagccttggtggtcgacgcgatcatctacaaccgcgcctccttcgcccagccgttccccttgctcgaaatccgcttcgatgacatcaacgggaagatgctggcgcgacgcacgttcaagcccggcgagtacctatccggcgagctggcgggccagcgcgaaatgccctcgcagatcccgatccacatcgcgcttgacatactcgacccaggcgccaaagccgtgaactacagtttgagttttcgctcccccgagtagccgctcgcccggctgttcaacgcggcaggtggcctgcttccaggtgtcgcctgccgcacagcgtaccgattcggcttccggttataagcttcgagctgctcagaatttgttcagaacagcctttaacccgtcatccggagcgggtattatgctcacccttttttgctgtcccgatcgacctaacaagcaggctccaggcagggaatcttcatgtcagcggtacgcatcggcccctatacccttccgaatcgattgatcctcgcgcccatggccggcgtgaccgatcagccgttccgccagttgtgccgccgcctcggcgccggcctggtggtatcggaaatggtgaccagcgatgtccgcctgtggaacagccgcaaatcgcgcctgcgcctgttgcatgaaggggacccggagccgcgctccgtgcagatcgccggaggcgatccgcagatgctggcagaagccgccgctcgcaatgtcgagctgggggcacagatcatcgacatcaacatgggttgtccggcgaagaaggtttgcaacaaagcggccgggtcggcgctgatgaaggacgaagggctggtctcggccattctcgaggcggtggtcggcgcggtcgatgtaccggtgacgctgaagatccgcaccggctgggacaggcagaacaagaacggactcacggtggcgaagatcgccgaacaatccggaatcgctgcactggccgtgcatggccgtacgcgcgccgacctttacacaggcgaggccgagtacgacaccatcgcggcgatcaagcaggcggtatcgatcccggtatttgccaacggggatatcgacacacccttgaaggcacgccaggtactgctagcgacaggcgccgatggactgctgatcggacgggcggctcagggcaggccgtggattttccgcgagatcgatcattatctggcaaccggtgagctgctagcgccgccggacctggccgaggtcgagcgcatcttgctggagcatctgcgtgccctgcatgccttctatggcgacgtcatgggcgtgcgcatcgcgcgcaagcatgtcagctggtatctcgcgacacttcccggcgcgcgcgaataccgcgcccggttcaatggtttggaagacagggacgcgcaatgcgccagtgttcgggcatttctggccgaacgccgaacaggccctgactcaggggatggaaaaggggtggctgcatgacgctgttgaacgaaacactgctaactggaacaacatccgtgagcgacaacgtgaatctcaagcaacacctcaatacgccgagcgaagcaggccagaccctgcgcggcagcgttgaaaaggcgttgcacaactatttcgcccatctcgaaggcgctgacgtcacggacgtttacaacctggtgctttccgaggtggaggcgccgctgctggaaaccgtgatgaactacgtcaagggcaaccagaccaaagcctccgagctgctgggcctgaaccgcggcacccttcgcaagaaactcaagcagtacgaccttctctaaagcggcggcaggccatcggctccaggccgcaggccgagccgcttttgcctgtagcctgaagcctgtagcccgttaggaaaatcatgaccgaccaaagcacccgccttcccgtccgccgcgcgctgatcagcgtatccgacaagaccggcgtcgttgacttcgcccgcgaactcgtcgccctgggcgtcgagattctttccaccggcggcaccttcaagctgctgcgcgagcacgacatcgccgcggtagaagtggccgactacaccggcttcccggaaatgatggacggccgggtaaagaccctgcatccgaagatccacggcggcattctcggccgtcgcgatgtcgacggcgcggtcatggcagagcatggtatcaacccgatcgatctggtcgcagtcaacctctaccccttcgccgccacggtcgccaagcccggctgcaccctgccggacgccatcgagaacatcgatattggcgggccgaccatggtccgcagcgccgcgaagaaccacaaggacgtcgccatcgtggtcaatgccgatgactacgccagcgtcatcgagaacttgcagagcggcggcctgacctatgctcagcgcttcgatctggcgctcaaggccttcgaacacaccgcgtcctacgacggcatgatcgccaactacctgggcaccgtcgaccagagcgccgaaacgctttccaccgaaggccgcagcctgctgccacgcaccttcaccacacagttcgtcaaagcacaggacatgcgctacggcgagaacccgcatcagatcgccgcgttctacgtcgaaaccgccgatgaagcttgcattgccaccgcccgccagctgcagggcaaggagctgtccttcaacaacgtcgccgataccgacgcggcgctggagtgcgtgaagagcttcgtcaagccggcctgcgtcatcgtcaagcacgccaacccctgcggcgtcgcggtggttccggaagacgaaggcggcatccgccaggcctatgaactggcttacgccacagacagcgagtcggcattcggcggcatcatcgccttcaaccgtgagctggatggcgagaccgccaaggccatcgtcgatcgtcagttcgtcgaggtgatcatcgcgccgagcatttctgccgaagctcgcgaggtggtcgcgagcaaagcgaacgtacgcctgctcgaatgcggccagtggccagccgagcgagcgccgggctgggacttcaagcgcgtcaatggcggcctgctggtgcagagccgcgacatcgcgatgatcggcgtagccgatctcaaggtggtcacccagcgcgcgccctccgagcaggaaatccatgacctgatcttcgcctggaaagtggccaagttcgtcaagtccaacgccatcgtctacgccaagaatcgccagaccgtcggcgttggcgccggccagatgagccgtgtcaattccgcgcgtatcgccgcgatcaaggccgagcacgccgggctgccggttcagggcgccgtgatggcgagcgatgccttcttccccttccgcgatggcatcgacaatgcagccaaggccggcatcaccgcggtgattcagcccggcggctcgatgcgcgacgccgaggtaatcgccgctgcggacgaagccggtattgccatggtattcaccggcatgcgccacttccggcattaacagggctgcaggctgcaggccgcaggccccaggcaaaagcactcacgctcttgcctgcggcctgttgcctgtggcctgcagctctctccgaaggagagacaaatgaacgttttaatcatcggcagcggcggtcgcgagcacgccttggcctggaaggtcgcgcaggacccacgcgtcgaaaaggtgttcgtggccccgggcaacgctggcaccgctaccgaagcgaagtgcgagaacgtcgccatcgacgtgctggccatagagcagttggcagatttcgccgagcagaacgtgcagctgaccatcgtcggtccggaggccccgctggtcaaaggcgtggtcgatctgttccgaacgcgcggtctcgactgctttgggccgaccgccgcagcggcccagttggaaggctcgaaggccttcaccaaggatttcctggctcgccacaagattcccacggcggactaccagaacttcaccgaggtggagcccgccctggcctatctccgtgagaaaggtgcgccgatcgtgatcaaggccgacggcctggcagcaggtaaaggagtcatagtcgcgatggccctggcagaagccgaggacgccgtgcgcgacatgctctccggcaatgcctttggcgatgcgggtgcgcgggtcgtgatcgaagagtttctcgacggagaagaggccagcttcatcgtcatggtcgacggcgccaacgtgctgccgatggccaccagccaggaccacaagcgcgtcggagacggcgacaccggtcccaatactggcggcatgggcgcctactcccccgctccggtggtcacggccgacgtccaccagcgcgtcatggacgaggtcatctggccaaccgtcaaaggtatggccgccgaaggtaacgtctataccggcttcctctacgcgggcctgatgatcgatcgcaacggcgcgccgaaggtgatcgagttcaattgccgcttcggcgatccggaaacccagccgatcatgctgcggttgcagtccagcctggttctgctggtcgaggcggcattggccaaggcactggacaagatcgaggcgcagtgggatccgcgcccgagcctcggcgtggtccttgcggcaggtggctatccgggcgactacgccaaaggcgctccgattcgcgggctggaagccgccgctcaattggacggcaaggtcttccatgccggtacggctttgaaggacggcacagtgaccacggccggtgggcgggtgctctgcgcaacggcgctgggcgaaacagtgtcggcggctcagcagaacgcctacgcactggccgctcgcatcgaatgggacggccatttctatcgccacgacatcggttaccgcgccattgcccgcgaacagggcgaaagctaaacgagatcgcggcgtccgcgcgtggcagtcgctagactgccgcgtcgcgcacttccgcgtatccttgcgatggttataatcgaccgtcacaccgctgaagggatgccactcgtgcgtcgactctgggtcgccattgcttttgccttcagtcttttgctggctgcgctgagcctatcgtccgtatttgccgcgaccaccgaatcgacctcgatcacgccgggcagcgatgcgttgccgacgacggattcgaactggcggttgctggtggatcagtccggcctgctgacactccgggaaatcctcgatcagcgaagcctgttccagcgcatcgaccaacgttcctacgcggcaccggcgagcgataacgccgtctggctgcaggtcagcctgcccgcctttgcccacccgaattggctgtggatgttcgcgcctcgggtgcagttactcgacttctatctgctgcgtgacggccatatcgagcgccatgtggaaaccggcgagttgcggccactggagtctcggcccctccccactcgcgcttatctgttctccctgccgaatgatggcgccccccgcgaagcctacatacgactgcgctcgtcgcatccgatcatggcgtggttccggaccgtcgatgagaccggcctcgtcaagctggccatgccggcctacctgttcggagccctgttcggcgccctggcgctgctgatgatctataacctgctgcgcttcgcctataccttcagctacagccatgtatggctcgccctgctgcacggcgccctgctgatctgcgccgtagccaacctcggcttgctggctgtctggtcaccgaaactgttctacagccagccgctgattgccgacatggcggcactgctgacctgcgtcgccttgctggcattcgccttcggtttcttttatcaccgccgaacgcgatggaccacctggctgttcgcgctgttggcgagccttgtcggcgggctggcggcaaccatcctgctcagcggccaactctggttcagctggctgatctacgccgcggtgctgatcaccgccgtcagcgtcaccgtcgtggccatctatcactggcggcagcgttacgatcccgcccggctgctggtcgccggcatgttgctgttcgatggcgccttcgtgctcgtattgccggtgctgttgggcttcaaccagttcgatcccgactggctgaccggtgtcatgttcagcgtggccacctgctccgggctgatcctgagctttgcattgctcgaacggcagcgtcagatccagtcggacaaccgtaaccagcacaccgccgaggccgtcatcagcgccgagctacggaccaaggcggacttcctggcaaagatcagccatgagattcgcaccccgatgaacggcgtgctgggcatgagcgaactgttgctgggtacctcgctgtcggccaagcagcgcgactacgtacagacgattcacagttccggcaacgaactgcttaccctgatcaacgaaatcctcgacatttccaagctcgagtccggacagatcgaactggacgacgtgcagttcgacctcaatgcgttgatcgaagactgcctgagtatcttccgtgccaaggctgagcagcagaaggtcgagctgatcagcttcgtccagccgcaaatgccgcacgtcgtggccggcgacccgacccgactccgccagacgctgctcaacctcctcgaaaacgccttcaaacagaccgaagaaggcgaggtactgctgatcgcagcggtggacgaccaggaggagcaaccgcgcctgcgcatcaccgtgcaggacagcggccgcccactggaagccgaggagcgcgatgcactgctcaacgccgcgctggatagccgcgactttctcgccgccacccgccatggcggccgtctcgggctgatcatcgcccggcagctggttcatctcatggacggcgagttcggcatccagacgggcggcatcacgggtaacacgctctggatcagcctgcccctggtagccaatctttcggagcagcccggcaacgagctggatgatgagctgaaaggcgcgcgcctactggtggtggatgacaacgatacctgccgcaaggtactcagccagcaatgcagcagttggggcctcgaggtcagcgcggtggcgtcgggcaaagaggcactggcgctactgcgcaccaaggcgcatctgcgcgagtacttcgatgtggtactgctcgaccaggacatgccagggatgacgggtatgcagctggccagccgcatcaaggaagacttcagcctcaaccatgacatcctgttgatcatgctgaccggcatgagcagcgcacctagcaaggtcatcgcgcgtaacgcgggaatcaagcgcatcctcgccaagcccgtcgccggctacacgctgaaaacgacgctggcggacgaactggcacgccgcaccagcgccatcgcacgggccgccaagacccaagccagcacaccgctcctgatccctggcgacttccgcatcctggtcgccgaagacaacacgatctcgaccaaggtcatccgcggcatgttgagcaagctcaatctgaaaccggataccgccagcaacggcgaggaagcgctcgccctgatcaagacgcagccttacgacctggtgctcatggattgtgaaatgccagtcatggacggcttcgaggccaccgcacggctacgcgcctgggaggcctccggcgggcgtccacgcacgccggtggtcgcgctgacggcgcacatcctcagcgagcaccgtgagcgtgcccgcgaggccggaatggacggccacatggccaaaccggtcgagatgtcacagctgcgcgagctggtcgagcactgggttcgcgtccgagcggcagcggcggatcagtaacccgacgccgcacccgagtcggtcggctccgcacgaacgtcgctgatcaccagcaagctctctggctgggccggcattcgcgattcgtccatgcgcaaatcctgggccgggaccgcgtaacgcatgtgccgcgtcagcatgcgcagcgcgctgaccagaagcgcgatggccagaggctcgcccgggcaacggtggccgcttgccacatctccgcccccttgcgtgatgaagttataagcgctgccattccaatcgaagaaacgctcgggatcgaaggtttccggttgcgtccagagccgggcgtctcgattggtgccataaaggtccagcagtacccgcgtgcccttcgggaaacggtagcccttccactcgaaatcctcgcgtacgcgcgccgcagtgaacggaaagaaggcatgcaggcggcgaacttcctgggcgaagggttcaagcaaggcatcctcgcgctgcaaccgcggccgccactccggatgcgccagcaactccagcgcggcgtagatgacgaaccgcgccaccgccacggttgggcgcaggagattgagcagctctacggcggccacgtgctcgtccagttccacgccgttttcgtcccggtagcgggcgacaaccgccagcgcccggctatcgtctattcgtaacgctccactgcgcacgcctctgatcagctcgatcagccagtcttccgcctctttacgtgccttgcgtgcgtgccagtggcggatgcccacgccgcccgccccatcaatcatggcggccaactgatcacgacgcagtgtgacttcgtcatcaccaagcggtacgccggcccactcgcacaccgcccgggtaaggatggcctgcacttctggcagcaggaccacgcgatcacagcgttgccacgcctcgatcgccgcctgccagttggcctcgctcaagcgaaccagctcggccaccgcctcatcgccgagcagtgacagaaagagctgcttgcgatgccgatgagcgtcgccgtccagcccctgcacaccgccctggccgaacagggtcttttgcaacatgcgcggcgccgcgtgctcacgctggaacagccgttcatcgtagaacagccttgcggcctcctctccgctcatgcatatggtgttctgcatcaacagtcgcacttgaaacagatccgagccgaaccgttggcatcggctggaaatgaacgtatagccttcgctcagcagggaaagcgagctttccacctgtgagtcgcgaggaatttcggacattcgtgcacctcatggtttgcctcttcgatggacctcatcgtgtagcctgggtgcccgacctcccgcagacgggttcaagaatgaacaaaacgcgcggttcgctgccgataaaagactggccgagttattgcgcggcgcatgcatcaccccgttatccgaaccttcgcttcgaggcatacgccgtcgccaaggagccaatgcaatgatgaagaggagcgatgtcgcctggacgcttgtcggcatcacggcggtactgctttccggcagtctgctctatcaggagattcgcggcctttcgctggccgaactcaccgacagcctgggggccatcagctaccgcaactggctgatggccagcctggcgacgctgggcgcctactgcgcgctggcctggtacgaccggatcgctgtggcgcatctgggcaaacatatttcgtggtggttcatcacgctgtgttcgttcaccacctatgccttggcgcataacgtcggcgcatcgatattttccggtgcggtggtgcgctatcgggcctatcgcagcaagggtctgacgccgcacgaaatcggcgtgctgatcgtgttctgctcattgaccttcttcctcggcacgctgctggcgggtggcgtggtgctcatcctgcgtccggatctgctgaaccggctggtcgacgtcgaaccctggctgtcgacggctatcggcgcatccctgctgtgcctggttggactctatgtgttcggctcgtggcggcatttcgcgccgatgcacatcggcaaatggcacatcgtctatccgcggctacctatcgtcggcaggcaactactcgcggcgccgctcgagctcgcttgtgccgccgcgatcatctacttcgcgctgcccgagtcgcagaacccgggttacctggtggtactgggggtcttcctcgcctccttctcgctggccttgctgtcccacgcacccggtggtctcggtgtgctcgaggtgacctttctcgccgcggtgccggagctgccgaccgcagacgtgttggccgcactgatcgtcttccgggtgttctatctgttgctgccgttggcactggcgattctggtggtggcggtattcgaagcgacgcaatggtccgagcggcggcgcaaaggctcactcggcccgtaagcgggtctagcggcgatgggctatggctatacaggtgcttccgggcgatcattcgccctcatccgagacgaaatcgaccatatgaccgatacccgcaccaaccgccccgatcccggccagccagccgggcatcagccgcggcccctgatggacctgatcatcagcatcgtcatcccctctctgattctgatgaaactcagcggtgaagaccgccttggtgccgacggcgcgcttttgctaggcctggcgttcccgcttggctggggattgttcgagctgatcaaataccgcaagttcaactggatcgcgctgctgggcctggtcagcgtgctcctgaccggcggcatcggcctgctgcggctcgatccgcaatggttggcgataaaggaagccgccgtgcccggcgtgatcggcatcgccgtgctggcatccacccgcacgcgctttccactgatccgtaccctgctgtacaaccccaaggtgctcaacgtcgagaaggtgcaccaacagctcgaacgcaacgggcaggtggcgcacttcgaaacccgtttgctgcgcgccacctattttctcagcggaaccttcttcttttctgcattcatgaactacgtgctggccaaatggatcgtcaagagcccggccggcagcgaagcgttcaatgcggaactgggccggatgacgctgctcagctatcccatgatcgccatccccagcatggtgatgatgatggcgatcttctactacctctggcgcacgattcacggcctgaccggcttgcgtctagaagacatcatcgcaactcccgggcatgacgggcggcacggcgaaggatcttgaagccttcgctcagttcgacatgagcaacatccataagggcaggctgagcgctgcaagcagcgtcgacagaaacacggttgagctgactgcccgggtgtcttcctggttggtcacgaatgccaggacgttaaccccgctcgggcacgccgccagcaacaccaggacgctgcgcgcctgatgactcaagccgggcagcaagccaccgacataccagaccaacgccggaaacagccccagcttgaccaacgtcagccccagtgcggcggtgctggggcgcagacgatagcgtgacaggctgatgcccagcaccatcagcgcacatggcaaggccgcctgggccagccaatccgccacgcgccacagggccttcggcatgtcgaggcccgacaggttcagcaaagcgccggacaacaggccgacgatcaacggattggcgaggttcttcagcaacgctttgccgctgaccttctcacccgagcccagtgcgctgtagaaactctgcagcgaaaacaggataaggctgtgaaacaccagaatcgcaaacacgtacaccaggctttccgcaccgagcaacgtagtaaccagcggaatcccgaccaacacattattggaataggcagccgtcagcccaagcggtgatgcgcggccaagccggctatgggcgaacagcccaacacaggcgaaaaccgccagcacgggcccgaaataggccaacagcagcatcggcgacatgccatcgctcaactgcgcacgggcgataccggtaaacaacaccgcaggcatgaacagcttgaaggtgacgttggcgagccctgccgccgcctcgcccgcgagccagcgctgccagcccagcaaatagccgagcatgatcaagccaaagataggcaatatcgcctgaaaaacgatcactcagcgtctccagcagcccgcgcggcataggtcgccacgccaaaaagccgcaagaatactccgagcagcgggccttttcgactcagtcgagcgcagcccgcaggacgacagatcaggtgcgcggcctgatcaggcttgggaaggctgaacgagccccgacgcaacgcccgcctcttctctggcaagggcatccagcaccaccgagaggtcgtcatgccaatcgcgcgtgtctatgccgaaggtggtttcgaaacgggagcaatcgagcaccgaccaaacgggtctgcgcgccggcgtcggatattgggccgtggtgatcggcgacacttgcggctgtctggagagcaggcccttggcctgtgcctggcgaaagatatccaccgcgaaatcgaaccaactgcagggcgaccggccactgtagtggtacaggccccaggcgagacgcccctgctcggcataccgccgcgccagctgcagcagcacctcggcaatgctgccggcctgggtggggcagccaaactgatcggccaccaccgagagcgagttgcgctggcgccccaggcgcaacatcgtcttgacgaaattgtggccatgcgcaccgtagacccagctcgtgcgcagaatcaggtgctcgtccagcgcggcctgaatggccgtctcgccagccagcttgctggcgccgtatacgcccgtaggcgccacctcgtcgccctcgcgatagggaatccgcgcttcgccggaaaatacatagtcggtggaaatgtgcagcaacggaatcgccgctcgccgggcggcttccgccagcctggcggctccgtcccgattgaccgcataagcctgctcgcgatgcgtctccgcgttatcgacatgggtataggcggctgcgttgatgatcatccccggttcgagctggtcgatcagcctggtgatctgagcgccatcggtaatgtccagctgctcacgtgtcatgccaagcgcttcgagaccataggcagccgcacggtctactagttcgtggccgacctggccactggctccgcatacaaggattcgcatctggttatcgcctcagtcaaggctcaccgataacggtgagcataatgttgcagaacggattcgagacaacatgtcacgtcaaaccaccgagatagcgcagtcgcgcctatttcaggccagcataaatgcattttgttccgccaacgtgacgcggcacgaaggtctgtgaaccaggttgctcgatctatcgcacaacgcccgccccttgggcggccgccacgttgaaaagcgcacgatcctagcacgggtgaaactcggggctcgcggcgaggaccaaattgggacgagggcacgatcgggcggcaccagacgccaggccctgcccggcattcctacctgcacgaggagcatcgacatgcccagaggtgagaaatccaagtacaccgataaacagcagcgcaaggccgagcatatcgaagagagctatgaagagcgcggcgtgtcggaaaaagaggctgaagcgcgcgcctgggctaccgtcaacaagcaatcgggcggcggcgaacgcaaaggaggctcggggcagaagaaaagcgaaacggccaagcgcgccgaccgcaaggattcggcacatcgcgcggccaaggcgcgctccggcgagtcgcccaacaagggctcggcccgcaaggaccgttccggtagcacctccctgaccgacctgactcgtgacgaattaatggacaaagcgcgtgagcgcgatgtgcgtggccgctcgaaaatgcgcaaggacgagttgatcaaggcgctcagttgaaggagccgaacatgcaggaacctgatccgcgcgatgatgggacgccaagtcccatccccgaacccgagcgcaaggaacccggcgagccgctgccgatcgaagagcccggcgaaccgggtcggcccgagaaagacgggccagactaaaactttccgccgcctcgtccatcacagcttaaggcccagcgagacaccgtcaggtgcgatggtctacatggcgaggcctatcgccaatcaagaacccaggagaccgtgatgagctacgtacaactgagcgacaaacagacactgcgtgatcgcgcccggcagcacgtggaaaacggcgccgtgaccgagagctattcggcggaccgcgacaccgtgatcaacctgctcaacgaggctttggcgaccgagctggtctgctatctgcgctacaagcgccactactatatggccaccggcctgaaatccagcgttgcggccgatgagtttctcgagcacgccaacgaggaacaggaacatgcggaccgtctggccgagcgtatcgtccagcttggcggcgaacccgacttcaatccggacagcctgaccgagcgtgcccatgcgcagtatgccgagggtaacggcttgcgggacatggtcttcgagaacctggtcgccgagcgcatcgcgatcgacagctatcgcgagatcgtccagtacatcggcgacaaggatccgaccacgcggcggatcttcgaggacatcctcgcgcaggaagaagagcatgccgatgacatggcaggcctgctcgacggcatgaactgaccacgaatacaagcaagcgaagcgcggctcaggctgctgcttcgctgcaaaaaaaagccacccgaaggtggcctcaaaataaggaaaggagagtactactcagccggcagctgccggacgcatgtaggagatcggtgcggtctgggaatcattgaaggtcaccacttcccacgcatccttctgttccatcagggtgcgcagcaaacggttattcaatgcatgtccggatttaaagccgcggaattcgccgatcaggctggtgcccagcagataaagatcaccgatggcatcgagaatcttgtgcttcacgaactcgtcctcataacgcaggccgtcttcattcagcacgtggtcttcatcgaccacgatcgcgttttcgacacttccacccaaagccaggttatgcgagcgcaggaactcgatgtcgcgcatgaaaccgaaggttcgtgcgcggctgacttccttgacgaaggaggtgcttgaaaaatccacgctggcggtctgggtgcgaccccggaaaaccggatggtcgaaatcgatctcgaaactcaccttgaagccttcgaatggcaggaacgtggcgcgcttgtcgccctcctccaccgagacctcgcggatgatacggatgaactttttcggggcgtcctgctcctgcaggccggccgattgaatcaggaatacgaaggggccagcgctaccgtccatgatcggcacttccgatgcggaaagctcgacataggcattgtcgatgccaagcccagccattgccgacagcagatgctccactgtatcgaccttgacgtctccgctaaccagcgtggtcgacatggtcgtttcgccaacgttctcagcccgggcggcgatttgtaccggcggattgagatcggtgcgacagaacacgattccggtgtccacgggtgccggcttcagggtcaggtataccttctcccccgaatgcaggccgacgccagtggcgcgaatgatgttcttcaaggtgcgttgtctgatcatggcttggtttcgctagtgcgctgttgcgaatggtttccaacaaaggtggcgatcatagcagaaccccagtttgctgaataccaatcaccccaatagtcctgatacatgcaatcaatcagcctgacgacgcaagaatgccggaatgtcgaggtaatccaggtcttcctgcgggttcatcttggcagcggtcgcggccgcatgggcctgattgcgcatgaccgtcgggcggtccagctcacggtagttcactgcagcctgctcctgacgggcagcgggtgcggcctgcggcgccactgcggcggcctggatggtgttgtcgacaaccttgaccggcttctcgttgcgcggaccgagaccggtggcgacaaccgtgacgtgcagctcgtcgagcatgtccggatcgatcactgcgccgaccttgacggtggcttcatcggacgcgaaggcttcgatgatctcgcccactgcagcgtactcaccgagcgaaaggtccagaccagcggtgatattgaccagaatgccgcgcgcgccttgcagattgacgtcttcgagcaacggattgcgaatcgccgcctcggtggcttcacgcgcacggttcggaccggtagcgcaaccggtacccatcatggccatgcccatctcacccatgacggttttcacgtcagcgaagtcgacgttcatcaggccggggcgctgcatgatgtcggagatgccacgtaccgcgccggtgagcacgtcgtcagccttggcgaaagcagccagcaggctggcgtccttgccgagaatggtcagcagcttctcgttggggatggtgatcagcgaatcgacgcattcggacaactgacggatgccttcgtcagcgacctgcatgcggcgacggccttcgaacgggaacggacgggtcacgaccgcaacggtgagaatgcccatctccttggcaaccgaagcgatgaccggcgcggcgccagtgccggtaccaccgcccatgccggtggtgatgaacaccatgtcggcaccttgcagcacttcggcaatgcgctcgcggtcgtccatcgcggcctgacggccaatatcgggattggtgcctgcgcccagtcccttggtgatggccgatcccaactgcaggacggtgcgtgcttcgattttcttcagcgcctgggcatcggtgttggcgcagatgaattccacgccttcaacgctgttgcgcaccatgtgattgacggcgttgccgccgcctccgcctacgccaatgaccttgatcactgcactttgcggggtatgatctacgagttcgaacatttccctctctccttccagctttctagttttaggtacagccgcactgctcagaaattgccttggatccagctcttgagccggtccacgacagatgttttgggttcttcggcgaaatggccgagaccggacatggaggtgccatcggtctgcttgcgcatgccgtagagcaacaggcccacgcccgttgaatagattggattgcggaccacatcggtgagtccgttgacactgtgcggtacgcccaggcgcaccggcatgtggaagatctcctcggccagctcgacggcaccttccatttttgccgtaccacccgtgaggacgatgccggctggcaccaggtcctcgtagccgctgcgacgcagctcggcctgaatcaatgtaaagagctcgtcataacgcggctccacgacttcggccagtgcctgccgcgagagttcccgcggcggacgatcgccgacgctcggtaccttgatggtctcgcctgggccggccagcttggccagggcgcaggcgtagcgaatcttgatttcctcggcatactgggtcggcgtacgcagcgccattgcgatgtcgttggtgacctggtcgccagcgatcgggatgaccgcggtatggcgaatcgcgccttcggtgaaaatgcagatatcagtggtaccaccgccgatgtccaccaggcacacgcccagttccttctcgtcgtcggttaacacggcatgggccgacgccagttgctcaagaatgatgtcatccacctcgagcccgcaacgacgtacgcacttctctatgttctgcgccgcgttcaccgcgcaggtcaccacgtgtactttcgcttccagacgcacgccggacattcccagcggttcgcggacgccttcctggttatcgatcacatagtcttgcggcagggtgtgcagcacccgctgatcggcaggaatcgccaccgcctgcgcggcatcgagcacacgttccaggtcggcgctgctgacttcgcgatcacgaatggcgacgatgccatgtgagttgaggctgcgaatgtggttgccagccaaaccgacgaaggcagagtggatccggcagccggccatcagctgcgcctcttcgacagcacgctggattgactggacggtcgactcgatgttgaccacaacgcctttcttcaggccgcgggacggatgagtgccgatcccgacgatctcgagttcgccgtccggcgtcacttcgccgacgagcgccaccaccttggaggtgccgatatcgagaccgacgatcatcttgccgctttgcacgctagacatgtgtttcattcctcaattcttcgcgacgacgggctcgtccgtcgtggtcgggctcggttcacgccacgcaacggccaaaccgttggcgtagcgcagatcgatccgcgcaattctgtcgctttcctgcaccagcgcttgctggtaaatggcagtgaagcgccgcattttttcgattatctgatcccttcccagcagcagttcgacgccctgcttggtcgtcacgaaccagctgccccgctcgcgcaattccaggcgagcgatggaaaatccgagaggccgcagcatctggctgagcatttggtactgctgcatcacccgctgctgggcccgcttcggaccatgcaactgcggcaagtgttcatactgagtgaggtcatcgggcgcaaacgcctggccgttgttgttcaacagcgactcatccccccagcgggcgatgggcaattgctcgtcgagacgcaccatgacctcgtccggccagatgcggcgtgcctcgacatgcgcgatccacggcatctgctcaaggtcgtgacgcagggcatcgagatcaaccttgaagaagctggcctcgacgaacggagccatccgcgcctggaccgcctgtcggtcgacgtacgttagctcgccacgcacactcaccttggcaatgggccgatccgcatagggcgcaaggcgctcgccaagctcatagagcccgacggccagggcgacaagcatcactggccacaggaagcgcttgaacgagctcaggctggggcgcggcaagcgtgccgagagcggctcacgctggaccaggcggctcgcgccccgctgtgcgggtttgcgcgaggcgcggccagtgccgggctgtgagtgacgcagcgtggtgatcatggctcagttcccttgcgccaggctggcatcgaggatcgccagcaccagctgctggaagtccagcccggcggcgcgtgcagccatcggtaccaggctgtgatcggtcatccccggaacggtattcacctccagcaaccagaacgcgccggcgctgtcctgcatgacgtcgacacgcgcccagccctggatgcccacggcctcgcaggcgcgcgccgaaagcatcttgagctcctgttccttggccgcatccagaccgcagggaatgcggtactgggtatcgttcgccacgtatttggcgtcgtagtcgtagaaggtgtgcggcgtgcccaggccgatcggcggaagcacttcgccgcgcagcgtggcaatggtgtattccggcccctgaatccattgctcgaccagtacctgagcgtcgtaggcgctcgccgcgcgccatgcggcgatcagctcggcaacgccggtcaccttggccatgccaatgctcgagccctcgtgcgccggtttgacgatcagggggaagcccaggctatctgcggccgcctggcaatcggcttcactggcgagcaccgcatgccgtggggtcggcaagcccaggctctgccagacctgcttggtacgcaacttatccatggcaagcgcagaggccaggatgccgctgccggtataggggattcctgcgcactcgagcagcccctgcatgctgccgtcctcaccgccccgcccgtgcagcacaatgaaggcgcgatcgatgcgctcactgcccaggcgctgcagtagatcgtcaccaacatcgatgccaaacgcatcgacaccagccgcttgcagcgccgccagcaccgcggcgccggatttcagggacacctcgcgttcagcgctcttgccgccaaagaggacggcaacccggccgaacgcctgaggatcacgagtcgattgcagggcggtcattcgctcttcctcgcggcgcttgtatcgccagcaaacaggggactattgatgagttgcggggccagcccgccgatgtcgccggcgccctggcaaagcaggatgtcgccggggcgcagtagcggcttgaccagcggcgccaggtcgacgccgcgttcgatatagatcggatcgagctggccgcgctgacggatgctgtgcgccagatggcggctgtcggcgcccggaatgggctcttcgccagccggatagacttccatcagcagcagtacgttggcgtcgttcaatacctgaacgaaatcgtcgtacagatcgcgggttcgactgaagcgatggggctggtagaccatgaccagacgacgctcgggccagccgccacgaacggcctggatcacggcggcgacttcgcgcggatgatggccgtagtcgtcgacgagcatcacgctgccgccatcgaccgggagttcgccatagacctgaaagcggcgcccgacaccaccgaactgggacagcccctggacgatcgcctcgtcatcgatgccctcatcggtagcgatggcaatggtagccagagcattgagcacgttgtggttgcccggcatgttgaccgagacatccaacgcgtcgaagccatcacgcagcacggtgaagtaggtgcgcatcccttcctggcggatattgatggcgcgaacgtccgcgtcttcacgggtgccgtacgtagtgatcggccgaccgacctggggaagtatctcgcgtaccaccggatcatcgacgcacaacacggccagaccgtagaacggcaggttgtgcaggaactctacgaaggtccgcttcagtttgccgaagtcaccgccgtaggtgctcatgtggtcggcatcgatgttggtcacgaccgcgaccatcggctgcaggtgcaggaagctggcgtcgctttcatcggcttcggcgatcaggtagcggctcgtacccagctgggcgttggtccctgcagcggtcaagcgtccaccaatcacgaaggtcggatcgagcccacccgcggcaaagaccgatgccagcaggctggtggtggtggtcttgccatgggtgccggcgaccgcgatgccgtggcgatagcgcatcagctcggcgagcatctccgcgcgaggcaccaccggaatcctttgttcgagggcgaaagccacctccggattggcagcatttaccgcactggataccaccagcacatccgcgccggcgacgttaccagcctgatgaccgataaagatctgcgcaccgaaattctgcagacgctcggtactcgccgaagccttcaggtccgaaccggagacgtcgtagcccagattgagcagcacctcggcgatgccgcacatacccacgccaccgacaccgacgaaatgaatccggcgaatgcggcgcatgcgccgtacctcggccttgaccgctgcgggggatttagccatgcgccacctccaggcagatatcgacgacggtgcgggtggcatccggtcgggccagacgacgtgccgtggcccccatggccttgagttgttccggttgcatcattacctcggtcagctgcgcggccagcgcggcagcatcggtttttgcttggggcagaagaacggctgcgccttccttcgccagatattcggcattgcgtgtctggtgatcgtcgatcgcgtgcggcagcggcaccaggaacgaaggcaagccggccgccgccagttcgctcacggtcagggcaccggcgcggcagatcaccagatcggcccaggcgtaggcacgcgccatgtccgtgatgaagggcgcgacctcggcctcaacgcctgcagctgcatagcgctcacgcgtgaggtcggcgtgctgcttgccggcctggtggaacacttcgggacgcagttccgcggtcacctggccgagcgcctcgggcaacagcttgttcaagggttcggcgcccaggctgccgcccagcaccaacagccgaggccggcggccgagcagggtctgcctgggggtttcgataaacagctcgtgacgtaccggattgccggtcgtacgccgcttggcgctctcgctgaaagtattcggaaaagcctcgcagacccgctgcgcgataggtgccaggctgcggttggcggttccggcgacggcgttctgctcatggatgatcagcggtaccccggcaagcttcgctgcgagtccaccggggccggtcacataaccgccgagccccagcacgcacaccggcttgagctcgcgcatgatgcggcgtgcctgaccgagcgaacgcaggagctggaacggagccttgagcagggaagccaaacctttgccgcgcagaccgctcacctgaatcagatgcaacggcagacccgcggcaggaaccacttcgttttcgatgccgcgcggcgtgcccagccagtgcacgctgtagccgcggctctgaaactcgtgtgcgcaggccagcgccgggaacacatgccccccggtaccgccggccatgatcagcacattagcggccatgggtgacctccctgctcttggtcgcggggacttcggcaaagtcgtcttcgctgaattcggcgtcctcgctgccgagtacggtgcgactctcccactcgatacgcagtagcaaggccatgctggcgcaggtcaccaccagggagctgccgccgtagctgagaaatggcagcgtcaggcctttggtcggcagcaacccgatattcacgccgatattgatcagaaactgaccaagccagaggaacgagacgccccatgcgatataggctgcgaaaaactgccgtgcacgctccgccgccaggccgatgtacaacgcgcggacgccaacgaaggcgaataacaagatcgtcaacagcgcgcccaccatgccgagttcctcggcaagcacggagaacacgaaatcggtatgtgcttcgggcaggtagaactgcttctgcacgctgttgcccaggcctacgccgaaccactcgccacgaccaaacgcaatcagcgcctgagtcagctggtagccggcgccgtattggtcagcccagggatcggtaaaggtgatcaaccgttgcaggcggtattcctgggtctggaccaggatgaacaccgcgccgacggccagcagcaccagcagggtgaagcggatcaggccgacgccgccgagaaacagcatcgccacagccgcacccatcatgaccacggtcgccccgaagtcgggttcgagcagcaacagcatggccatcggcaacagcaccaggaacggcttgaggaagccccacaggctttcgcgcacctcgtgctggcgacgtacgaggtatccggcgagatagaccacgacgaacagcttggccagttcggacggctgcacgttgaacgcgccaaagccgatccagcgcatggaaccgttcacttcgcgaccgatgccggggatcagtaccagaatcagcaacgcgaaggcgccgagcagcaacatccagtccagccgttgccaggccgagagcggcaccagcagcacggccgccgccgcgaccaggccgagcaccacgtacaccagatggcggaccatgtagtacatcgaattgctggtgttcaccgcggcgacttcggatgaggccgaagtaatcatcaccagccccagccccaacagtgccaagcagccggcgagcatcgggaagtcgagatccaggccacgacgaccgaacagcggcgacggtgcgctacgcagaaaggcgagcatcagctgagcgcccccaccgctgcggcgaactggcgtccgcggtcttcgaagttctcgaacatgtcgaggctggcgcaggctggcgacagcagcaccgcgtctccggcgttggccagcttggctgccagctgcacggcttgttccagggtctggacgcgatgaatgggggccgcaccggccagtgccgcggataggcgctcggcatcgcgacccagcaggatgacctcgcggcagtgatgcgagacggggctgtgcagggcagaaaaatcggcgcccttgccgtctcccccggcgatcagcaccagctcgccggcaatgtcgctacccaggccgtcgatcgccgccagtgcagcaccgacattggtcgccttggagtcatcgtaatagctgacgcccttgcgctcccccacccactggcagcggtgcgccagccctgtgaagctgcgcagggtggcgagcatcggctcgaatggcaggcccgcggcatgccccagcgccaaggcggccagcgcattggattgattgtgagcaccgcgaatcttcagctggttggccggcatcagcgcatcgaactggaacgcgaggtacttctcaccgttctcctcgaacaggccgaagcctttgaagtccggcttgccgagcccgaaggaccacgccggcacgtcatcggcaatcaacgggcggctgaggcgatcgtcgcggttgatcaccacttgccgcgcgccgcggaaaatccgatgtttggcctgatgataggcaggcaggccctcatagcgatccatatggtcttcgctgacattcaggcaggtcgcaacctcggcgttcaagcggtcggtcgtctccagctggaagctcgacagttcaagaacgtagagttcgacctgatcatcgagcagatccagcgccggcgtgcccaggttgccgccgacggcgaccttgcgaccggccgccgcggccatctcgccgaccagggtcgtgacggtacttttcgcgttcgagcccgtgatcgccacgatcggcgccttggcttcccgcgcgaacagctcgatatcaccgagcagcttgacgccggaggctgccgctacctgcagcgcaggcgtgctgatcggcagaccggggctgaccaacagttcactggcacgacagaggaactccggatcgagctcgccgcagcgcacttcgacgtccgggtactgtgccttcagagtggccagttccggaggattcgcgcgcgtgtcggcaacggcgaacggcaggccgcggctcgccagatggcggaccagggacatgccgctcttgccgagaccgacaacgatgcggaactgatcggaagctatgagcactctttattacctcaatttcagcgtggcgagaccgaccagcaccaggatcaccgtgatgatccagaagcgcacgatgacccgcggttcgggccagcccttgagttcgaaatggtgatgaatcggcgccatgcggaagacccgcttgccggtcagcttgaacgaggccacctggatcattaccgacagggtttccatcacgaacaccccgcccatgatgaacagcacaacttcctgacgaacgatgacggcgatcgtcccaagggcggcaccaagcgccagcgctccgacgtcgcccatgaagacctgcgcgggataggtgttgaaccagagaaaaccgagccccgcgccgatcaacgcgccgcagaacacgatcagctcgccagcgccggggatatagggaatcaacaggtagtcggcgaagttcacgttgccggacagatagcagaagatacccagcgcaccgccgaccatgaccgtcggcatgatcgccaggccgtccaggccatcggtgagattgaccgcattgctcgaaccgacgatgacgaaataggtcagcaccacgaagccgattcccagcggaatctcgatgtttttcaacagcggcaggatcagcgtggtttcgacaggcgtctgcgcggtcatataaaggaagatcgcggcaccgagaccgaacaccgattgccagaagtacttccagcggctcggcaggccgcgggagtttttctcgatgaccttgcgatagtcgtcaacccagccaaccgccccgaacagcagcgtgacggccagaaccacccagacatagcggttggacaggtcggcccacagcaacgtgctgatggcgatcgcgctgaggatcagagcgccgcccatcgttggcgtacccgatttcgacaaatgcgtttgcggtccatcggtacgtaccgactgaccgatctggcgcagctgcagcgtgcggatcagccacggccccatccacagcgagagcacaagtgcggtcagcacgccgagaatcccacgcagcgacaggtactggaagaccgcgaagcccgtgtggaatcgttgcagatactcggcgagtagcagcagcatcagtgtttctccgtgccggacgcggacagcgcggcgacgaccttatccatcgcggcgctccgtgatcccttgatcaaaatggtggtggcgttgccctgttccaggcgcaatgcttcgatcaggtcttgctgagtggcgaaatgacgaccgccggccccgaacgcctcgactgcgtgcgccatcaacgggcctaccgcgaacagtgcgtccaccttgccctcggcgtagctgccgacctcacgatggccctgttcggcccactcgcccaattcgcccatgtcgcccagcgccagcacagtacggcctgcaaaaccggccagcacgtcgatagcggcgcagatcgatgcgggattggcgttgtagctgtcgtcgatgagacgcacgccgttgccgagcatttgcgcaacacctctgcctttgactggctgcaggctctcgagacctgtgacgatatgttcagcggcaaccccaagggcgtgcgcagccgcggcggcggcgagcgcattggcgacgctgtgacggccgaggagattgagttgcacgcgcacggagccgaacgggccggccagcacgaaattcgggcaaccacgcagatcgtaggcgatcgaggcgggatggaaatctgccagcgggctctggatcgcgaagctcaccacgcgtttgccggctgctcttttttcccaggtcgcataggctcgatcgtcacgattgagcaccgcgacgccatgctcgccaagcccgtcgagaatctcgcccttggcttcgacgatcttctccggcccgccgaactcacctacgtgggcggtcccggcgttggtaatcaaactgacatccggctgcgtcaggctgacggtgtaggcgatctcgccgacacgcgaagcgcccaactcgatgacggccgcctggtgccggggcgccagttccagcaaggtcagcggcgcgccgaggtcgttgttgagattgccgcgcgtcgccagcacggcttcagcgccgtaggcggcgcgcaggatactggccagcagttccttgacgctggtcttgccgcttgagccggtgatcgcggcaacagggccgctgaacgcggcgcgattctgcgcacccaggcggcccagggcgatgcggctatcggcgaccaccagttgcggcaacgcaaccccttcaacgggccgctcgactagcgcggccacggcgcccttgccggccacctctgccagataggcgtgaccatcgaaacgtggtccggtcagcgcgacgaacaattgccagggctcgatggcgcgactgtcggtactgaccgaacggaaggtcgcgtccgcaccgaccaaccggccagacaggaccccgaccagatcgctgaggcgcatggcttcaagcatgggtatccctccaggcagccagggccagagcggcctgatcgagatcggagaacggcgtgcgttctccttttatctcctgataatcctcatggcctttgccggccagcagtaccacatcgtccagttcgctaccgccgatgcagttcgcgatggcttcggcgcgaccgggaatgaaggcggcttgctccgggtgggtgaagccggcacggatctcgctgaggatctgcaacggatcctcgttgcgcgggttgtcgtcggttaccacgactcgatcggccaggcgctcggcgacctcggccatcaatgcacgcttgccgcgatcccggtcgccaccacaaccgaacaggcacaacagcttgccccgggtatgcggccgcaaggcgccaaggaccttttccagcgcgtcgggcgtgtgcgcatagtcgaccacgaccaagggccggtcgccgccgcccagacgctgcatgcgaccgaccggcccttcgatgtccggcagcaccgcgaggatctcatccagcgggtagttcatgcccaacagcgcaccgaccgctgcgagcacgttgctgacattgaagcgaccaagcagcgggctgcgcagggcacgctggccctggggcgtgaccagacgcgcatggataccatcgtcgtcgagccgcacttccgggcaatacaggtaggcggaggcgtcttccaggctgtacgtgatgagtcgtgagtccagctgttgcgcagcgagggcgcgcccgaaggtgtcgtcgatgttcactacccggcagctgagccctggcatcttcagcagacgcgccttgacctcgccgtaggcttccatcgaaccgtggtaatccagatgatcgcgcgagaggttggtgaacaccgccacatcgaatgccagcgcggcgacccgcccctggtcgagcccatgcgaagagacctccatagccactgcccgagccccctgcttgcgcaggttcgccaggttggcctggacgccgatggggtcgggcgtcgtgtgctggccaagctcgagttcgccatgaaaaccggtgccgagcgttccgatgatgccgcaacgctcacccatgcgatcgagagcctgggcgaccagataggtaacgctggtcttgccattggtacctgtgacgccgaccagatgcaggctgcggcttggctcgccgtagaaccgcccggcaatggcggagagctgctcagccaagcggcggaccggcaccagcaccgcgctttcggcggtcatgtgcgccgcgccttcggcctcgtaggcaatggccgccgcgccacgggagatcgcgtcggcgatatgcctgcgaccatcgtgctgcagcccgggcactgccaggaacaggtcgccgggacggaccttgcggctatccagcgtaagctcacgtatgagcgtggcgctcgaggcctggggcagcagctgattcaacggcatcggcatcagatgcgccctcccttggtcttggccgcctcggccgtttggatgtcttcggccggcggcaggttgtcaggcgcaacgttcagcaggcgcagtgcgccagacatcacgcggctgaacaccggcgccgagaccaggccgccgtagtagccacttttgcttggctcatcgatgaccaccgcgacggcgatgcgtgggtctttcatgggaccgaaaccggcgaacatagaacggtaggcgttttcctgataaccccggctgctcgacgaagccttgcgggcggtgccgctcttgcccgccacgtgatagccgggaacctgggcgcgaaacacgccgcgcggggcctcgatgacctcctgcagcatgccttgcagggttttggccaccgcgggcgatatcacttcgacgccctccgggttctggtccacgcgggtcatcgacatcggcaccaggcggccattgtttgccagcgtgctgtaggcatgggccagttgcacggcggtcaccgacaggccgtacccataggaaagcgtggccgtctcggccttgcgccactctcgatggctgggaaggttgccaacccgttcgccagggaagcccaagccggtgtcctggccgaagccgaccttgcgcatgacgtcgtgaatcgccgcgccgccgatatcgaaagcaactttactcatgccgacgttggaggaattgatcagaatgccggtcaggtccagctcgcgaccttcgctcttggaaacgtcacggatggtgtaacgaccgatgcgcagagagcctggccacacctcgacgatatcgctgggtttccaacggccggtttccagcgcagcgctcatggaaataggcttcatggtcgagcccggctcgaacacgtccgtcatcgcccggttgcgcatggcgtccggctgcaaattacgacggttgttcgggttgtaagtcggctggttgaccatggccagcacttcgcccgttttcacgtcgagcatgaccaggctgcccgccttggcaccgaattccagcagcgcgttgcgtagctcgcgatgcgccagatattgcaggcgcaggtcgatggacaacgccaaggtcttgccgggcttggcgttcttggtcacctgaacgtccttgatcagccggccccgacggtccttgagcacttgccgcttgccaggaacgcccgccagccactcgtcgtaagccagctccagaccttcccggccacgatcgtcgatatcggtgaagccgaccacgtgcgcggccacttcacccgccggatagaagcggcgaaactcttcctgcgagtagacaccggggatgcccagcgctagcacacgctcgccctgctcgggcgtcagcccccgcaccagataggtgaattcgcgctcagcttggtccttgaggcgctgcgccagcgcggcaggctcttggcccagcgcctcagccagctccggccagcgcgcctgtgccgcctgcaattcccgggggttgccccagagcgtggtgactggcgtgctgaccgccaagggctcaccgtggcgatcggtgatcaacccgcgatgcgccggaatcggtatgtgacgtacgctgcgggcgtcgccctggttctggaggaagctctgatcgacgacttgcaggtcgacgatgcgccaggcgagcgcgccggtcatcagcgccagaagccccagcacgatgcggaaacgccaaggatagagcgcgccttgcagcttcatggtgccaccagcctgacatcggctgctgccgggatgtgcattttcagctgctcggccgccagtgtctcgatacggttgtgggccgtccaggtgctctgctccaggatcagtcgcccccactccgcctgagccttgtcccgcacgctgagctcgccatagagttcgttcagcagctgacgattccagtgggcgctgtaagcgacagcgatcgccgacaagagcacggcgatgaacagcaccagcatcagcaagctaccgttgggcatggcacgccgtagctgactcatcgcagcttctccgcaacgcgcatcacggcactgcgtgagcgggggtttgccttgacctcttcagccgacgcgtactgtggcttacccattaatttcaggcgtggcacgaacttctcagggatgatcggcaggtcgcggggaagggtatcggcctcgcccttggcgtgacgccgcatgaactgcttgacgatacggtcttccagcgaatggaagctgatcacgaccagccggccaccgacctcgagcgcctccagggcagcctcaaggccggcctcgaggtcgccgagttcgttattgatgaaaatgcgcagcccttgaaaggcgcgggtcgcggggttcttgcctttttcccaggccggattggcgaccgtcagcacttgagcgaggtcggccgtgcgctcgaacgggcgctcggcgcgccgctgcacgaccgcacgcgccatacgcttggcgaaacgttcttcaccgtattctttgaatacgcgagcgatatcctcttcgctggctgtggcgatccactctgcagcactgacgccacgactgggatccatgcgcatatccagcgggccgtcgttgaggaagctgaagccgcgctcgggatcgtccaactgcggcgaagatacgccgagatcgagcaagacaccgctcaaagtcccggtccagccgcgctgcgccacttcggcacccagttcggcgaaacttctctgcacaacgacaaagcggccatcctcggccgccagtgcttgtcccgtagcgattgccaggggatccttgtcgaagcctagcaaacagccatcaggcccaagctgccgcaacagaaggcggctatgccccccgcgcccgaaggttccatccagatagcgaccatccgcgcgcacggcgagtgccgcaacggcctcgtcgagcaatacggtcacatggttataggcgctggtctgggtcacaggattagatcacgtagttcttccggcaaggcgccgggttgtttgatggccgccaggtccgcatccgcttgtgcgttccagtcgtcctcgttccacaggctgaacttgttcagctggccgaccagcatggcccgcttgtccagccccgcatattcacgcaagcgcggtggcaccagcacccggccgctgccatccatctccagatcgaccgcgttaccgatcagcaagcgctgcagccgacgactctcttctctcaacgacggcagctctcgcagcttggcttcgatctgctcccattcgggcagtgggtaaatacaaaggcatcgatcaaccgcatcgatggtgacgatcagctgaccttcgcagcgcgaaacgagctcgtcacgataccggctgggcatggctagccgccctttggcatcgagactgatggcgtttgctccgcgaaacacggctgcgcttcccctgaattagctttccaagcccattaatacccacttcgttccactttccaccacttgtgcgcactatagaaatgcagcagccccaccgtcaaggtgaccctgacgggaaaaacccttatgtggcaggaatttagcaaccgaaacggggataaacgatgaagcggagggctagcgggaaagagatatcgagcgaaagcaaaaaactgcacttcaaagttaaagtactttgttaagagcaagatttttttggtctaaaaagcggggatgtttcggcaggaaagtcggagagtcgatctgtaagccgggttctgtcgaggacagtcattcctctacgacagccatcactgactgcctctagcaacctacccggatccagcgcgggccacgccaatggatccctatttggtcttgctccaagtggggtttacctagccacggactgttgccagccgtgcggtgcgctcttaccgcaccttttcacccttaccggcaccggagtgcttaggcggttattttctgtggcactttccgtaggctcacgcctcccaggcgttacctggcacttcgccctatggagcccggactttcctccctcccttcttgcggaacaaaaagagacagcgactgtccgatcgactctccgacgcgcagggtactttgctgcaccccgggctgcaagccgatcagcaccgatcaagcggtcggacgcgccgacacgggccggccgcgccgttcagccctcgcttttctcctccagtgcaagctgataaagcaggtttttcctgatgccggttatctcggcggcaacggccgcggcgcgcttgaccggcatctcggccagcaacaggcgcaacactctacgagcgttctggtcgatcgcgtcatcaccctgtggcgcctgccagccacccaccaccagcacgcactcgccacgctgctggttgctgtccgcagccacccaggagcgcagctcgcccagcggcagcccttgcagcgtctcgaatgtcttggtcagctcacgcgccagcaccgccgggcgctccggaccgaacaccgcctccagatcctccagggactcaaggatacgatgcggcgcctcatagaaaatcaccgtgcgcggctcttcacgcagcaactcgagacgagcacgacgcgcagcctgcttggcgggcagaaagccctcgaagatgaagcgatcggaaggcaggcccgccgcggaaagtgcggcaatcaatgcacaggcacccggtagcgggacaacgcgtataccagccgaacgcgcctgcctgaccaggtgatagccaggatcggagatcagcggagtgcccgcatcggagatcagcgccacatcgtcgccggccagaagccgcttgatgaagcgaccgccctcgtcacgctcgttatgctcatgacaggcagccaatggcgtggcgataccgaaatgctgcagcagccgagccgagtgacgggtgtcttcggccgcaatcagcgccacctcggccaggacacgcagcgcccgggcgctgacatcttccagattgccaatgggtgtggcgacgacatagagcgtgcccacagcggaattagcgtcagctggcgcagtcacagggcgtacctcgatcacgtaaaacgcgcattgtagcccgtttgggagccgcgacatcgcgcccctgacggtgcttgggtacaatccgccgacattcgccagcgcttccaggaatgatcacatgatggctcgtcttcgcccgttcttcttcttatgcattgctgccgtgctttcggcttgcgccagctcgccctcctccacactgggcgagctgccacgcaccccgcaggcatcgacgcaacagctgctgaaggaagccgacgccagcaaccctgccgaggccgcactgttgcgcctgtcggcggccgaccagagcctgcagcaaggcaatagcgcccaggcaacgaagattctcgagcaggtagacgttgcacagctgatgccggcgcagcagatgtttgccaaaaccctggaagcggagctggcgctggccgacaaccagccacaacgcgcccttcaagccctgcagcatcctgcgttcgagcgtctcgccgagctgccggtcgaacagcagctgcgcacccagctggcgcgcgcccaggcgttcagcgcaaatgatcagccgctggaagccgcgcgcgaaagaaccttcatcgccccgcttctgagcggtgaagccgccaagcaaaatcacgaagcgatctgggcactcgtgtcgagcctgccgatcgaacagttgcagccgaccacggacgccgatctatccggctggctgtcgctggcagctgtcgtgaaacaggccggcaccatcgggcagcaacaacgcgcaatcgactcctggatccagcagaaccccaatcatcccgccgcacgcgcactgccggaacccctggtgaagcttcgcgagctggcggacaaaccgctatcccacgtggcgctcttgctgccgatggacggccctctggcgagtgttgcgcgagcattgcgtgatggctttctcgccgctcatctggcggcccgccaagacctgaaaatcgagctgttcgacagcacgcgcttaacttccctggacgacttctatcgtcaggccgccgcctctggcgtcgaactcgtcgtcggaccgctggacaaggacatggtccgccaactggccagccgcgatcagctacccatcacgacgcttgcgctgaactacagcgacgcgaatcagaaagccccgccgcagctgttccagttcggtctggcagcggaagacgaggctcgtgaagtggcgcgccgggcctgggccgacggccatcgccgagccattgccctgacgccgcgcggcgattggggtaaccgcgtcttccaggcgtttcgcgagcaatggcaagagcaggggggaaccgttgtcgcggccgaatccctggcagaaccggtcgagctggccaaccagatagccgatctgctgcaagtgcgcagccatggcgatgcccagccatcgcgacgccaggatgtcgatttcctgttcctggcggcgactcctcagcaggcgcagcaagtcaggcccacgctgatcttccaatacgctggcgacctgccggtctatgccacttcgcacctgcacgccgccacggataaccgcacccaatacctcgacctggaaggcattcgcttcacggaaacgccctggctgctggatgcgcaactccctcttcgccaggaaatagagcgcaaatggccgcaggcacgcggcagccttggccgtctgtatgcgatgggcgccgatgcctacctgctggcgccgcgcctgaatcaactgctggcgcttccagacactcggctcgacggcctgtccggcacgctcggcatcacgccagagcgacggatcgagcgtcagttgccctgggccgtattccacgacggtgaagttcagccactggcggatgcgccctattgagcaccagcaagcagatcagcggacagctcgccgaagatgctgcacagcagcatctacaacggcatggcctgcggctgctgtgccggaactggacctgccgcagcggcgagcttgatctggtcatgctcgatggcgatacagtagtattcgtcgaggttcgctataggcgccacgccgcgtggggcggcgcgctcgaaagcgtcgacctgcgcaaacagcagaagctgatcaaggcagcccagcatttcctgcagaaggagagtcgctgggcgaggcacccctgccgcttcgacgtggttgccctgggcgcggcggcagacagcgcggagaagcccaactggatccggaatgcgttcgatggctgagcatgcttcgcactggctcgcccggcgcgtatcgcacagatcacgcctatcccaagattcatacggcacggcaacagcagcccggcccgtcacctgaaggtcaaacccatggacatgcaatcccgtatacgtcagctttttcaagcgagcatcgaaaccaagcagagcgccatggaggtgcttgcccccagcatcgagcaggctgggcaggtcatggtcaatgcactgctcagcgagggcaagattctcacctgcggtaacggcggatcggctggcgatgcgcagcatttctcttcggaattgctcaaccgcttcgagcgagagcgccccagccttccggccatcgcgttgacgaccgatagctccacgctcacctctatcgccaacgactacagctataacgagattttctccaagcagatccgagcgctgggtcagccgggcgatgtgctgctggcgatctccaccagcggcaactcggccaacgtgatccaggccatacaggccgcacatgatcgcgagatggtcgtggtcgcactcactggccgtgacggcggcggcatggcctcgctgctactgcctgaagacgtcgaaatacgcgtcccggcgaaagtgaccgcgcgcattcaggaagtgcatctgctgaccattcactgcctgtgcgatctgatagataaccaactgttcgggagcgaagaatgaattcggttcgcctgcacgccctcacgcttgcactatgcctggccgccaccggctgcagctcggtactcacggccactcgcgacgaccccatcaatgacaaccgcgggactcgcacgatcggcagcaccatcgatgactcgctgatcgaaacgaaagcagccgtgaacatcgccaaagcccatccagatctggatcaggcgtcgcacatcatcgtcgccagctataacggggtcgtgctgctggcaggccagacgccgcgccaagaactcaagcagctggccgaacaagccgccagctcggtgcagcgggtcaagcgcgtacacaacgagctgcaggtactcaagccctcctctgcgctggctcgcagcaacgactcctggctgacgaccaagatcaagacgcagatgctcgccgacgccagtgttccaggctcgcgcatcaaggtcattaccgaaaacgggatcgtctatctgctcggtcttgtgactcgccaggaaggcaaccgcgcaacgagcgtggttcagggcgtttccggcgtgcaacgcatcgtcaagctgttcgaatacatagactgagccaacccaaccctgcaaacgcggcggcagtgactactgctgccgcgtctttgccctttcgccgcacctgcggccaggcttgccccggcttatttgacgaccttcagactgggacgcccggtagccgcaggtcgcgctgagtccaccgaatcgtcagtaggcgtgtcgtccggcggcgtaggctcaatctcgaagaccatcccctgcccattttcccgcgcatagatcgccatgaccgcagcagaagggacatgcaagctatgcgggacaccaccgaagcgcccctcgaaactgatcgcctggttatccatctgcaactgccgaaccgcgctaggtgccacgttcaacacgatctgcccatcactggcaaaaccatccgggacctgtacgcccggatgatcggtattaaccagcagatgtggcgtgcagtcattatcgacgatccactcatacagcgcccgaaccagataaggacgacttgaagtcatatacggcctctcttagcgcatgccgcgctcaacggcggatagactgacctggaaggcctcgcgagcaaagctggtctccatgtaatcgagcagcggcttcgctgctcgcggcaactcgattccaagtttgggcaaacgccacaggataggcaacagacagcagtccaccagactgatctcatcgctcatgaaaaacggccgctcggcgaacaccggcgatacgcccgtgaggctttcacgcagctccttgcgcgcttgggcccgcgccgcttcagccgtacggcgatccgatatccgatccaccaggctgcaccagtcccgctggacccggtggaccagcagccgggtgttggccctggcgacaggataggccggcagcagcggaggatgcggatagcgctcctccagatattcggtgatcacgttcggctcatagagggccagatcacgatccaccagcgtcggcacgctggcgtaagggttcacctcggtcagtctgaccggacaacgcgccggatcgacatcgagtatctcgacgctgacgcccttctcggccagcacgtagcgcacccggtgcgaataatggtcggcgggatcggaataacaggccaaccggttggtagcggccatagggtccctcctcattggaattatgacgtagcagaaaaaagcgcgcgcccataagggcgcgcgcagggtaccgcaaaacagcgagggatcagtgaacgtctttccagtattcccgcttgagcaaataggcgaatacgaagaagaacgccaggaacagcagcacgtaggtaccgatgcgctggctttccagcttgaccgggttagccgagtaggcgaggaaggtcaccaggttcttgatcttctcgtcgtactccgcctcggtcagggcgccggtgccgggcacgaccgtcatcgcatggcaatcttcatgcgtgatcggcgttccggtcagcgggtcgaattgcttgcgcccatcctcgactacctgaacctgtttgcaggctaccgattcaccttccggaagcttgctcggcagcacctgacgcccctgcagcggagccagtacatgcggcatgcccacgttcgggaacacggtgttgttcacaccatagggacgcgtaggatcttcatagaagctgcgcagataagtgtacagccagtcgttacctcgcacacgcgccaccagggtcaggtcgggcggagccgcgccgaaccaggtcttggcatcgctcggcttcatcccgatctgcatgtggtcgccgatcttggcgccactgaagacgacattgtcgagcatgacctcttccggaataccgagatccttggcaacgcgctcgtagcgctgatactgggcgctgtggcaacccatgcaatagttggcgaaggttctcagaccatcctgcatggcgaccttgtcggtcagatcgacatcgacctcatcaagatgtacgccggcgccagaagcaaaaccaaacaccggcaccagtgcgaaaataaatgcagcaaattgctttttcatcagccagccaccctttgcggaactactttggtcttctcgagcttggtgtagaacggcatcaggatgaagtaaccgaagtaaatagcagtacagatccgagataccaacgtacgctcaggcgttggagccagcacgccaagcacgccaaggatgacgaaggagatgcagaacgccagcagcgcaaccttgctcatccagcccttgtagcgcatcgatttaaccgggctgcgatccagccacggcagcacgaacagcacggcaatggcagcacccatagcaattacgccaagcaacttgtctggaactgcccggaggattgcgtagtaaggagtgaagtaccagaccggtgcgatatgctcaggcgtcttgaatgcgttcgccacctcgaagttgggcttttcaaggaaataaccccccatctcggggaagaagaacacgatggcgcagaagacgaacaggaacaccaccacacccacgatgtccttcaccgtgtagtagggatggaagggaatgccatccagcggcacgccagcttcgtccttgctcttcttgatatcgacgcccatcgggttgttcgagcccacctcgtgcagcgcgaggatgtgcagaacgaccagaccaagaatcacgatcggcagcgcgataacgtgcagcgcgaagaaccggttcagcgtgatgccggaaatcaggtagtcaccgcgaatccactgagtcaggtcaccgccgataaccgggatggcgccgaacagcgaaatgatcacctgggcaccccagtacgacatctggccccacggcagcagatagcccatgaaggcctcggccatcagcgcgaggtagatcatcatgccgaagatccacaccagctcgcgcggcttctggtaggagccgtagaggatgccgcggaacatgtgcagatagacaacgatgaagaacgccgacgcaccggtcgagtgcagatagcgaataatccagccgtattccacatcacgcatgatgtattcgacggaggcgaacgcgccttcggcggacggttcgaaactcatcgtgagccagataccggtgaggatctggttgaccagcaccagcaaggccaatgagccaaagaagtacagaacgttgaagttcttcggtgcgtagtatttgctgagatggtcttcccacatcttggtcgcggggaagcgcgcatcgacccactccatgaacttgctcatcatgcgctctcctgatcaacgccaatgacgaccaaagcgtccgtctcgtacgtatgagggggaaccggcaggttcagcggagcaggctgccccttgaacacgcggccagccaggtcgtatttcgaaccatggcacggacagaaatagccaccaagccattctgggcccagatcaggcggcgccacttccggacggaaggatggggagcatccgaggtgcgtgcacaacccaaccaggatcagcacctctggcttgatcgagcgcaccactgggtcgacgtatgccggctgctcggacgcttcggacttcggatcagcgacggtgtcggtgagcttgtccagattggccagtgcctcctcggtacgacgcacaatgaacaccggctgaccacgccactcggcaaccatctgctggcctggctcgatcttgctgatatttaccttaaccggtgcaccggctgccttggccttggcactcgggaaccacgatcccacgaacgggaccgcggcacccaccgctcctgcagcacctactaccgaagtagcggctacgaggaagcgacgccggccagcattcacgccgtcattgctcattcagtcgtctcccatcagtttcttatggcctaccgaaagcaggcgtctactacgtaaaaacagccgcgaaaaaattcgccaaatggtaaagaaaagcccctcgtatgacaaggtaataaccggatacaacctggcgcgaagccccgaatatcggggctctctaaacgcgacacgctgtcgcatgggtaaaattgaacccataaaaaaacgcccagcttcgaataaagctgggcgttttttgtgaagcgggattagcgcttcgagtactgcggacgcttacgcgctttacgcagaccgactttcttacgttcaacttcgcgagcatcgcgagtaacgaagccagccttgcgcagagcaggacgcagagtctcgtcatactccatcagagcacgagtgataccgtgacggatcgcacccgcctgaccactcacaccaccaccaaggacggtgacgtagatatcgaatttctcgacagtctcggtcagctccagaggctggcgaaccaccatacgagcggtttcacgcccgaagaagttgtccagctcgcggttgttgatggagatcttgccagtacccgggcgcaggaatacgcgcgcggttgcggtcttgcgacggccggtgccgtaattttgagtcgccgacataatgaactattccgttaaatcttcagttcttggggctgctgagcggtgtgcggatgattggcacccttgtacaccttcagcttacggtacatgtcgcgacccagcgggttcttgggcagcatgcccttgaccgcggtctcgatcacacgttctggcgccttggcgatcagcttctcgaagttgatcgacttgatgccacccgggaaaccggagtgagagtagtacatcttgtcggtggtcttagcaccggtaacacgcacttgctcggcgttgataacgacgatgtagtcgccggtatcgacgtgaggggtgtattccgccttgtgcttgccacgcaggcggctagcgatttcggttgccagacgacccagggtctggccggcagcgtcgacgacgaaccagtcgcgcttgacggtttccggtttagcagtaaaagtcttcattcgttatagcctcaggggccgccctgaaaataagacggcgaatcttactgaatggtgctcgccctggcaaggccagggcagccggaaacagacgctatcgggggctcgggtcagcgcgtccgctacggcagtgttcggtaggctaggcatcccctaccttgtttttgcgtcagcgggctaggcatccccggcgacaggctgcggaattatccggattaccagcaaaatagcaagcacgtttggttagccagtcgcgggttttcacttcaccgccatcaccggcgcataatccagcacgggcatgccgtaacgaaacttctcgcccccattcacaatccgaacaacaacccaacagaccaaagggatatcgcatggaattgcgccgactcggccgcaccgatttgaatgtcagctcgctgtgcctgggcagcatgacctggggtgagcagaacgatcaggaccaggcgttcgcccaactggaccgcgccagggccgcaggggtcaactttctcgacacggccgaaatgtatccagtgccgccacgcgcagaaacctacgccacgaccgagcgctacatcggcaactatttcaaggcacgcggcaaccgggccgactggattctcgccagcaagatcgcagggcctggcaacggaataagccacatacgcgacggccagctgaagatgaaccgccagcacattgtcgcggcgctggatgcgagtctgcagcggctgcaaaccgactggatcgacctgtaccaattgcactggcccgagcgcagcaccaatttcttcggccagctcggctaccgccaccaggaacaggacttcacgccgatcgaagagaccctcgaggcactcgatgaacaggtaaaggccggcaagatccgccacatcggcctgtcgaacgaaacgccatggggcaccatgagattcctgcagctggccgagtcacgcggctggccacgcgcagtatcgatccagaatccctacaacctgctcaatcgaacctttgaggtaggcctggccgagatcgccattcgcgagcaatgcggactgctggcctattcgccgctggcctttggcatgctcagcggaaaatacgaaaacggcgcacgacccgccggcgcgcggataaccctgttcagccgcttcgcgcgctactccaacccgcaatcccaggcagcctgctcccgctatgtggcgctcgcccacgagcacggcctggccccagcccagatggcactggcttacgtaacgcagcaacctttcgttaccagcaatatcatcggcgccacctcgctcgaacaactcgagcgcaatctcgcaagcaccgagctgcgattgtcagccgagatcatcgaagcaatcgaaacgatacacaccgagcaacccaaccccgcgccttgatggcgccatagcgaaaccccacggcgcgagcgggccgccgacgaacaagcccgcatcgtcaccatcgcaagacgcccgcccggcgcgaggacaccgaagatgattgccgccgaactgctcgctccgtccagtcttttgctgggctggctgctctatgccagcggattgatctgggcttgcgtgcgggcgccctgggttgagctgttcagcgatacccggcgccagcacctgctgtttggcgcggtgctggcggtttttctactgtggctggttcgccgggatttcgactccggactgtcctttcatttcatcggcctgaccgcggtgacgctgctgctggactggccactggcgattctggccgccttcaccgcccagctcggcctgaccgccacgggacaccagcaactcgccgcgctcggcctgaatggtgtactgctggtgctgatacctgtcgcggtgaccgaactgtgcgcaatcgcggtcgaacgcaaccagccgcgcaacctgttcgtctatatattcttttctggattctttgccgcaggactcgccgcattgctctgcattctcgctgggctcggcgtcctattgcttgacggccggtatccgatgccgccgtggctggccgacttcgccggctacatctggctggtgatgtttcccgaagcgttcatcaacggcaccgtggtcagcgcgttggtcgtgttctatccggactggatggaaaccttcaaccgcagccgctacctgcaagccccttggaaagacgacagcaccaaacaggattgaggcagcggcgatgtgatcggcgccgcctgcttcagtgctgccgaggcggcatgtcacccgagaagagatcatcctcgagctcgtcacccggaatcgcatgctcctccgatgcccaggcgccgaggtcgatcagcttgcagcgctcggaacagaacggacgactcggactcttcacactccattcgaccggtgccccgcaagtcgggcactcaacaaccgtagtactcattcctgacctcctcgtagcgtcagatagaaattgtgcagccgctccacttcttgccgcagccatgcgcgatcgcggtcgttgatcagcacatcatcggcatggcgcaagcgctcttcgcggctggcctgagcttcaagaatggcgcggatctgcgcttcgctactttgatcacgccggctggcgcgctcgacttgcaacgcctcaggcacatcgaccaccagcactcgatcgacctggcgatattgaccagactcgaccagcagcggcgacaccatgatcgcgtagggagaggtcgcccgtgcgaggtgttcagcgatttcctgccgaatcagcggatgcagcaactcttcgagccacttgcgctgcgctgcgtcccggaaaaccagcccgcgtaacgccgcgcgatccagactgccatcctgcgcgaggacggtttcaccgaagcgctcgacgatcgacgccagcgcgggccgacccggctcgacgacccagcgcgcggcatgatcggcatcgacccagtgcaccccgagccgaccgaattcttccaccacggcgctcttgccgctgccgataccgccagtcaaacccaggacccaaggcttcatcacgaatcgtccagaccggaaaacgacgcgcagtagtaacgcctgaaaagtgaagatgcaagcgtaaggtccgccaaccgcgcgtagcgctcggccgcgcgaagaaccagggttcttctgtaagagtcttcagggcgaagcgtgcatccttctgcgggagccccgaccccagggcgaagcctctggctacagccaaccctacctacccaaggcaggcgtatctccgtcagaatcgagcaaactgcaggtagctcgaggtaatctgctcaccccagagcaaagcgatccagccggcgatagccagataaggtccgaagggaatcgccgtaccgctgtccgccttctgcacgcgcagcaagatggtacccagcaccgcgcccaccacggacgacaacagaatggtcaacggcagcacctgccaccctccccaggcgccaagcatcgcaagcagcttgaagtcgccatagcccatgccttccttaccggtcaccagcttgaacagccagtacaccgaccacagggcgagatagcctgcgactgcaccccacaacgcgtcggacagcgaagcgaacaacccgaagtcattgacgatcaatcccacccagagcaggggcagcacgatggaatccggcaaaagctgatgatcgacgtcgatcatgctcatcgccagcagtccccaggtcagcagcaacatcgcaccggtctgccaggagaagccgaaatgccaggccacatagccggataacaacccacatagcagctcgaccagcggataacgtttactgatcggcgcgtggcaggaagagcacttcccgtgcaaggccaaccagctcaccagtggaatattttcccacggacgaatctcatggtcgcagtgcgggcagtgggaatggggcaataccagattgaacgtagaggcaggctcgaccggcagctcgagaaactcgcgagcctgcgcccgccaatcccgctgcatcatgatcggcaagcgatggatgacgacgttgaggaaactgccgaccaaaaggcccagaacgattgcacataaaacaaaggccagcgggttgccggccaaaaaatcaaccacactcatcgcttaaactaccgacccaagctggaagattggcagatacatggcgatgatcaaaccacctaccagaacacccaaaacggccatgatcatcggctccatcaacgccgtgaggccatcgaccatgttgtccacttcgtcctcataaaaggtcgcgaccttggctagcatctcatccagcgagcctgactcttcaccgatagccgtcatctggaccgccatgctcggaaaggtgccggtcgtacgcatggaaaaattcagctgcataccactggatacatcgctcttcaccttcattgtcgcgttgcggaataccacgttgcctgtagcaccggccaccgagtccaacgcatcgaccagcggcacacccgcagcaaaagtcgtcgctaaggttcgtgcaaatcgcgcgacagccgatttatagagaatggcgccaaccaccggaacctttagcaggaaccgatcgaaactgtttcggaaccgctcagacttgccgtgagccgtcttgaacgcatacgcagcgacaatcaagcccaacagtacgatgtaccaccactcttgcagaagctctgacaagccaatgacgaaaagcgtaaaagccggcaattcggcaccgaagttggcgaacacctcctgaaactgcggcaccaccttaattaacagaatcgccgatacgatgatcgcaaccacgaccaccgcaatcggatagttcattgcctttttgatttttgccttcaaggcctcggtcttttccttataggtcgccacgcgatccagcaaggtctccagcgacccggactgctcacccgaatcgaccaagttgcagtacaagtcatcgaagtactggggcttcttgcgtagcgcactggcaaagctgctaccggccgccacttcctgcttcaggtcatctacaagcttgcgcatattcgggttgtcgaagccctcgccgatgatatcgaatgactgcaacaggggcacgcccgccttcatcatggtcgccatctgccgagtgaacagggcgatgtccattggcttgatcttcttgccggcactgaacagagataccgacttcttgcgcaccttctgcggattgacgccctgcttgcgcaactgcgccttgaccagcgcgggactgacgccactcagctcgcccttgatcttcgcgccctgccgattggtcccttcccaggtgaagacactggtttttaccgctttctgcgccatgttaatccttggtcacccggttgacttcttccaggctggtcacgccctgcatggcttttactagagccgaagttcgcagatcgttgaagccgtctttacgcatctgggtggaaatgtcgatggagttgccgtcctccatgataatcctggccaatgccggcgtgtttttaaccacttcataaataccgacacggcctttgtatccacccttgcaattgtcacaaccgacaggcccgtagattttgaacgtcccgatcttgtcagccgggaagccttcttccagcagcgcctcgcgcggcaactcgacttccttcttgcaggtgttacacagcttccgcgccaaccgctgggcgatgatcagattgaccgaggtggcgatattgaatgccgccacgcccatattgcgcagacgggtcagggtttcggcggcgctgttggtgtgcagggtcgacataaccatgtggccagtctgcgcggccttgatggcgatctcagcggtttccaggtcgcgaatttccccgaccatgatgatgtctggatcctgacgcaggaaggcgcgcagcgcctgggagaaatccataccttgacgcggattgacgttgacctggttgattccctccaggttgatttccacaggatcttcggccgtggagatatttacatccactgtgttgagaatattcaggccggtataaagagaaaccgtcttacccgaccctgtcgggccggttaccagaatcatcccctgcggctgtttgagggcattcatgtacagctctttctgatcttcctcataacccagcgcatcgatgcccatctgtgcgctggaggggtccagaatccgcatcacgatcttctcgccccacaaggtgggcagggtatttacacggaagtcgatggctttcgtcttggacagtttcattttgattcgcccatcctgcggcttgcgccgctcggaaatatccaggcctgccatgactttcagccgcgcggaaatacgtggcgccagttggataggtgggcgagcgacctcatgcaggatgccatcggtacgtagccgtacccggaataccttttcgtagggctcgaaatgcaaatcggaagagccgccgcgaatcgcgtcgagcagcatcttgttgacgaagcgcacgaccggggcgtcgtcggcggcttcggccggatcgtccttggcggaatcgtccgttgcggtttggatatcgacgccatccaggtcgacgtccgccagatcctcgaggccggacgtggcgctctcgaaaaacttgtcgagggctaggcccagtttgtcgtcttcgaccagaatcgcctcggtcgtcagcccagtgctgaactggatatcggtgacggcttggtggttggtcggatcggagaccgcgacgaacaacttgtggccccgctttatcagcggcaatacgcggtgctggcgggccaacttttcggcgaccacatctttgggcaggctttcgggatccagcgcattgagatccatataggcgacgccgaactgatccgccgccagctccgcaactgcacggccgctcgccagccggctctgcacgacataagtcaccagcgacagcttgttacgcgcagcctgctgctgcgcttgctgagccgtcttatcgtcaagcaggccggtcagcaccatctgcttggccaagccggaaaggacaacgttgtcggtcatgggtatggttcttctggattaatgcccgccttataacgcagatagccaggcgtgccaaacggcacatttacgagtgacgaaatttgtcagaagcatgcgaatccaggcagcgtgcatggttcacattgcctcgcagagccgcggatatcgtgagctgaagaagttggcatggcggctgcaaaggagagaccaggctcaactgcctgaaccttcaaggagaaatacatgaaagctcagatgcaaaaaggttttactctgattgaattgatgatcgtcgtggcgattattgggatcttggctgcggtggcgttgccggcctaccaggactatacgacgcgcgcaaaaatgtcggaggtaattggttttgcttcgtccgccaagacagcagtaactgagtgcattcagaacaacaatgctgcaaccaactgcaacaccaacagccttgtcgggctagcagatgctacggacattaccagcacctacgtagagtctgttacagtcggcgctggcggacaggtaactgtagcaattcagggtacaaacgattctactcttgacgctgcttctatcgtcctgacccccactctttctacaaccggcggaggcgttaattgggcatgttccccttccgccaacacaattaacaaattcttgccagcaagctgccgctcttaattaagtgtatttcagccctacaaagaaggccgccctttcgggcggccttcttttagctatggttttttattttctagtagttacaccaccgcttgctgcgctttacgggacctataattcccagaggatcgtggagcttacctcattaacgctgctgtgcctgctgtatcccccccggcaatttccagctggaccaatggggatcgcttttaccggattcatcatgaccgggctagtttctactgctctgtcgacgaacccaggctgggcagccattgagtacctgcgttttgccctgcttttttccctcgccttcagtatagccaatgcaggcgagcgcaagctcctaggctatacctatgcgctggcaactatagccttaactatgctcattaaaatcagcattggtatatatgtggtccaccacttgggcggaggcatcgcagcggtggcggacggcttttccaaccacagacattttgccgagttttttgtagctcttcaaacactgtttgcgctcctcttattggggagccaaagaagactaatacgatatgccgcgctagcacccttagcagtctctactatcattatcttaatgggaagcggacgagcctccgccaccgccctagccgtcggagcattagtgtatatctatcttaatagtacccgacgactatacgcggccatcatggcaatttctggagtaactttaggttgggccgtatattattttctgctcacgatgcccgaaagctttctcgcgcgcccccaagattccggccgcttctcattatgggcgattggattcaaaagctggctagacaacccagtttttggcataggaccaatgcagttcgccagcatcccaaatgatattgctgcgcatccccacaactcagccattcagttcttatgtgagtggggcctggctgggttgttgttagtagcgtcttttttcgcgagttggctgtcgttgactttcaggccagacacatacggaagccacaggatagcgatttcagctactgcggccgttaccggcctgctagtcagctcaatgttcggtggcgtttttgtcgttccagccgtcgagctactattcttcgtgcttctcggcatttcaatgacatccgactctattaaatggagccgatcccgcttcgccgcgatgggaacacgagtcttcgctatctcgatttgcgtattatccttactgagctggggatggcagacctcagacacccctaggggcgcgcccgtagatgcgccacggttctggcaggatgggcgcttacccatttacaaaatgaactttaaaacatacccagcaattccgtcagccctgtagggcggatgcaacccgcgtggttacacatcgcctgaccggaacccaaaaccctgccctaaccggcgggttttggttttccgcgctcttcattgaccacacgaccaatcatggcaaaaaccaggcctcagcttgctactatcgtgcgtcgcgccggccagctatcagggggggtcacccagccgacggttattcaacatcgtgcggaatggtagccaccacatcactaccagcccaatcggaaagacatacgccataccgaacccactttgcccaacctacgtcgactcggcatcgttgcgcggctgcggcttccttaaacaaaaacgccctgcgtcggcagggcgtcttcgtgcaacagggtggctcgcttaaatagccccacgcttgcgcagcatgtcgatgacttgcctggcgccctcttccaccgtcagtgactcggtatcaatcaccagatcggcattgcccggcacgtcgtaggggaaggattcgcctgggatgttgtcgccgcccgcggcgtatagcccctgcggatcgcgctgctggcaaacctgcggcgatgcctgaacgtagacggtcacgacgcgatcgctgccgattagcgccttggcctgttcacggccttcggcatccggggcgacgaaggccgcgagggtgatcaatccggcctcgttgaactggcgcgccacatgagcggcgcggcgccaattctcggtgcgcccggcacgatcctgcggcaaccccttgttcagatcgtgacgcaggttttggccgtccagcacatagaccgcacgccccatatcgaagagcttgcgctcgaccgcataggccagcgtgctcttgccggcgccagaaagaccggtaaacaggacggtcgccggctgctgtccgaaacgcgtcgcgcgctcttcggtagagacgtgagccaacgcgccatggtggccagacgcaccatgtgcaaccggatcggcgatgatcataccggcgccgacggtgccgttggtgagccggtcaatgatgatgaacgcgccagtggtacggttctgtgcgtagccgtccagtgcgatcggcgcatccagagcgaccttgacccgtccgatttcattgagctgcaggctgctggccgggccgtgctcaagcgtattcacatcaacccgatgggtgatgctggcgatcgaacccggtacgtagctggtggcgcgcttgatgtcgtatttcttgcccggcagcatcggctcttccgccatccacaccagcatggcatcgaagctgtcggcgatacgcggccggttgtcggcatgcaccagcatgtcgccgcgcgatacgtcgatctcgtcttccagggtcagggtgatcgcttcgcctggagtggcctgctccaactcgccgtcaaaggtgacgatggacttgaccgtgctgcgcttgccagacggcagtaccacgacttcgtcgcccttgcgcaccacaccactggccagggtgccggcaaagccgcggaagttgaggttggggcggttgacgtattgcaccgggaagcgcaggtcatcgaagttgcgatcgccggcgatctcgacgctctcgaggatctccatcaacgactgcccctcgtaccagggtgcgcgctcagagcggttgacgacgttgtcgcccttgagcgcggacatgggcacgaaatgcagcgacgtgggttgcagctcgatgcgctcggcgaaggccaggtagtcggccttgatgccctcgaacacggattgatcgaagtccatcaggtccatcttgttgatggccacgacgatgtgcttgatgccgagtagcgaggtgatgaagctgtggcgtttggtctgggtctgcacgccgtagcgggcatcgacgaggatgatcgccaggtcgcaggtggacgcgccggtggccatgttgcgcgtgtactgctcgtggccgggcgtgtcggcgatgatgaacttgcgcttggccgtggaaaaatagcggtaggcgacgtcgatggtgatgccctgctcacgctcggcctgcagaccgtcgaccagcaaagcgaggtcgacgtcatcgccggtggtgccggactttttcgaatcgcgggttatggcttccagatgatcttcatagatcattttcgagtcgtgcagcaggcgcccgatcagggtgctcttgccgtcgtcgacgttgccgcaggtgaggaagcgcagcagctccttacgctcgtgctgggccaggtacgcgaggatgtcggcggaaataagatcggattgatggctcattctctgtaactccacggctgcaggcttcaggcctcaggcggcaggccaacagcacacaaaattcaattcgcgattcggccgataaggccgcttagcattcgagatattcgggttgactcttcaagccaggcggcagcgatagactgcctgatgtagccaatatcagcgccaattagtatctgtgtgcgcagctcgccacaggagcctttggcaattcgcagaaaatggcacttttccttgtcgcttccgcgctccattccctccgctatgttgctaggaacggaaagcgctgagcgagttatttggtccttgaatccgtaatcacggcagccggcaagctcttggtagacctgaacggttaaaactctagccttctgccacacctcaagcctttcgaaatccatttcatcagctccgttcgaaactgtggccagcctgcagcttgtagcctgccgcctaggcctccggcctagaaatacccctgacgtttcttttcttccatcgaccctgcgccatcgtggtcgatgacacggccctgacgttcggaagtacgagtcaggagcatttcctggatgatctccggcagggtggtagcggtagattccactgcaccggtcaacggatagcagccgagggtgcggaaacggaccatgcgcttctcgatacgcgccttttcctcatcggtgaggtgctcgaggatgcgctcgtcgtcgatcatgatcagggtgccgtttttctcgatgacctcacgctcggcggcgaagtacagcggcacgatcggaatctgctccagatagatgtactgccagatgtccagctcggtccagttcgacagtgggaagacgcggatggattcgcccttcttcacattgccgttgtagacattccacagttcgggacgctggttcttcgggtcccagcggtgcttgctgtcgcggaaggaatagacgcgctctttcgcgcgcgacttctcttcgtcacgccgtgcgccgccgaaggcagcgtcgaagccatgcttgtcgagcgcctgcttgaggccctcggtcttcatgatatcggtgtgcttggcgctgccatgggtgaacgggttgatattctgcgcgacaccgtccggattgatgtgggtgatcaggtccagatccatctcgctgaccatcttctcgcggaagcgatacatctcctggaatttccagcgggtatcgacgtgcatcacagggaacggcagtcgccccggaaaaaaggccttgcgtgccagatgcagcatcacggccgagtccttgccgatggaataaagcatcaccgggttgtcgaattcggcggccacctcacggatgatgtggatgctttccgcctccagctgtttcagatgcgtcagtttgtcgaccatggctactcacgaatttgcaggtggacggccggcatggccggagcgaggccgcaactttaccacggcacaaaattctaatcagggcgctttttagatctaaatgctctagctttatgccgacgcagcagtgcacccgtttcctgttgaatgcccgcgcacgggggcgttcatcaggtcaggccgggttggggcagtcgatgaacaggtgctcgacagcaaagcgcttcgccaggtactcgcccagcgcctggacgccgtaacgctcggtggcatggtgcccggccgcgaagaaactcaagccgttttcgcgcgcgatgtgcacggtgggctccgacacctctccggtgagataggcatccacgccggccgccacggcctgatcgatataaccctgggcgccgcccgtacaccaggcgatacgccggatagggccgctcccttcgatcatcagcggctcgcggccgagcacagttcgtatccgctgcatgaactcggccggtgccaacggcgtgtcgagcgaaccgacgaggccgaccgaacgcgggttgtcgggctccagcggcccctcgacgatcaggccgagcatgcgagccaaccggatgttgttacctacctcggggtgcacatcgagcggcaggtgataggccagcaggctgatgtcgtgggtgagcagtgtcttcaatcgacgctgcttgataccgaccacacgcggatcctcgttcttccagaaatagccatggtgcaccagcacgacgtcggcttgcgcttcgacggctgcatcgagcagggcctggctggccgttacgccactgacgatgcggccgacctgcgatcgcccctccacttgcaaaccgttcgggcagtaatcggaaatcttggcggagttcaggtagcgatcggcttcttcgatcaacgtagtcagcgcaacggccattcagacatcctcttgggaacatatgggtgctggcgatggcgggcgcgatccagatcgcgcttgtgccgcggccgccattcgggagcctgcggtcatgtcgcagattccccaccggcaaggctgcatttcgccgccagcttcgtataatgccgcaccttaaggggcgtcatggcccttcgcaacctacccggattctcaatcgcgatgatcaatgccctgcgttttcttggctggccgttgctggtgggcctgctggtggccctgctgatcattcagcgttacccgcacctggtgggcctgagcaccgagccggaatacagcctgcgacaagcaccactggtgggcataccgcagcagggcccctactcctacgccaatgctgtgagcagcgcggcacctgcggtggccaatctttacaccaccaaggtgatcgacaattccagccagcctccgatgctcaaggatgacccgctgttccgtcgattctatggcgatagcctgccccgtcagcgccgcatggaatccagcctgggctcggcagtgatcatgagcccggaaggctatctgctgaccaacaaccatgtcacggcgaatgccgagcagatcgtcgtggccctgcgcgacggaagggaaaccctggcccgggtgatcggcagcgatccggaaaccgaccttgcagtgctgaaaatcgatcttgccgatttgccggccattaccatcggccgctcggatggcatccgcatcggcgatgtgacgctggccatcggcaatcctttcggcgtgggccagaccgtgacgatgggtatcatcagcgcaactggccgcaaccagctgggcctcaacacctatgaagacttcatccagacggacgcggcgatcaaccgcggtaactccggcggtgcactcgtcgataccgccggccatctgatcggcatcaacacagcgatcatctccgagtccggcggttcacagggcatcggcttcgcgatcccggtcaagctggcgatggacgtgatgaaatccatcgtcgagcatggccaggtgattcgcggctggctcggcgtggaagtacagtcgctcacgccggaactggcggaatcgttcggccaggcggggcggggcggaatcgtcgtcgccggcgtctaccgagacggcccggctgaacgtgccggcttgcggccaggcgatctgatcctcagcatcgatggccagcaggcaagcgatggtcgtagctcgatgaaccaggtcgcccgcgtgcaaccgggcgacaagatcgatatcgacattctgcgcaacggcaagccgttgacgctaaccgccgaggtcggcatgcggccgctggtagagaaaacccctcaataagcttcgtcacgcacgacgccaagccgcgctgcaatcaggcgtcaggcttggctccggcttttagggggaatcaccccgagcgaagcgtttgctttttcagcgaacagatcgtccagcccacggacacgccggctacggcacgcgctcagagctggagaacgcctgccctggccgtcagcagaggcctttcaacgcggcgagcaatgcctggttctgttccggcgcgccaatggtgatgcgcaggaactgatcgatgcgcggctgcttgaagtgccgcacgatgatgccctgttcacgcaggccggcagccacgcgcgcagcatcctgttgcgagtgccgggcgaaaatgaagttcgctgccgaaggcagcacctcgaaacccatagcctgcatcgcggcgacgaccgtttctcgactggcgatcacctgaccacaggtctgcgcgaaatgctcgcgatcctcgaacgccgccgcagcaccggcaatggcgatgcgatccagcggataggagttgaagctgttcttgatgcgctccagtgcctcgatcaagtccgggtggccgacagccaagccaaccctcaagccggccaacgatcgcgatttcgacagcgtctgggtaaccagcaggttcggataacgatccacgagggcgatagccgaggtgccaccgaagtcgatataggcttcatccaccagcacgacggaatccgggttggcctgcagcagtcgttcgatcgcgtccagcgccaacagacagccagtcggcgcattgggattgggaaagatgattccgccgttcggccgggcataatcggccacgtcgatctggaaacgatcattcagggcaatggtttcgtaagcgatgccatacagcccgcaatagaccggatagaagctgtaggttacgtccgggaatagcaacggcttgccatgctggaaaagaccatggaaggcgtgggcaaggacttcatccgagccattgccgacgaacacctgtgccggctgcacgccgtaatagtcggcaactgcgcgcttgaggcgctcgccgttggggtccggatacagccgcagactgtcggccagctcggcctgcatcgccgcgatggcctttggcgacggaccatagggattttcgttggtgttgagcttgaccaggttggccagcttcggctgttcgcccggcacgtagggcaccagctccttgacgaaggggctccagaatttgctcatccgcccttctctcctcgaatgtggtcggtttgacgtggggtgaagcacagcgaagtgttttcactcaccacgttggctgagctggacaagcaaagcggtgtccagcccaggatctgacttgccgctagcctttgatccggtactcggcgcttcgcgcgtgcgcggtgagggattcaccacgggccagtaccgacgcgatcttgcccagttcggacgcaccgtcagccgagcaattgatgatcgaggagcgcttctggaagtcgtatacccccaagggtgaggaaaaacgcgccgtcccggacgtgggcaggacgtgattgggcccggcgcaatagtcgcccagcgcctcggcggtgtagcgccccatgaagatcgcgcctgcatgacgaatctgtggcagccactgctcgggatcggcgacggaaagctcgaggtgctcgggggcgatgcgattggcgacatccatggcctgttgcatgtcggccacctggatcagcgccccgcgaccttgcagcgaagcgtgagcgatgtcgctgcgctcgagcgtgggcagcagccgagcaatgctctccgccacccggtcgagaaatgcagcatcggggctgaccaggatcgactgagcgtcttcatcgtgctcggcctgggagaacaggtccatggcgatccagtcggggtcggtctggccgtcgcaaaccaccagaatttccgacggcccggcgatcatgtcgataccgaccctgccgaacacgtggcgcttggcggtggcaacgtaaatgttgcccggcccgacgatcttgtccaccggcggcacgctctcggtgccgtaagcaagcgcggcgacggcttgggcaccgccgatggtgaagactcgatcgacgccggcgatgcaggccgccgccaacaccagttcgttgacttcgccacgcggggtgggcaccaccatgaccacttccggcacaccggccaccttcgccgggatggcgttcatcagtaccgacgacgggtacgacgccttgccgcccggcacatagagcccagcgcgatcgagcggcgtgaccttctggccgagcaccgtgccgtcggcttcggtgtaactccatgagtcctgtttctgccgctcgtgataaatgcggacccgctccgcagcggcctccagcgcctgacgctgatcggcggtgatacgctcgagcgccagctcgaggcgctcacggggcaggatgagatcggccatggacgccacttcgagaccgtcgaaacgctgagtcagctcgaccagtgcggcgtcgccgcgctgacgcacggccccgatgatctcgagcacacgctggttcaccccgtcatcggacacgctttcccagctcaacagatgatccagatgtcgcgagaactctggatcagcggcgttgagtcggcgaatgtcgatgggagtggtcatagcgggcctcataagagatacatgctggttttcaggcgcccctagattaacaagccagccgcgcgggcacctgagtatttaggcgatgacggataggcgaaccggctgcccgactaaagttagccctggtgtgccacggcgctttgcaacgcatcgatcaatgcctggatgcgcgcatgctgcatcttcatcgaggccttgttgaccaccagtcgcgaactgatcatggcgatcagctcttgtggctccaggccattggcccgcagcgtattaccggtgtcgaccacatcgatgatcttgtcggctagacccaccaagggcgccaactccatcgagccgtagagcttgatgatatcgacctgacggccctgctcggcgtaatagcgcttggcgacgttgacgaacttggtcgcgacccgcagtcgccctttgggctcgaatgcaccaaccttgccggcggtcatcagcttgcagttggcgattttcagatccagtggctcgtaaagcccctggccgccgtattccatcagcacgtccttgccggcgacgccgagatcggctgcaccgtgttcgacgtaggtcggcacgtcggtagcgcgcacgatcagcagacggacatcatcctgggtggtcgggatgatcagcttgcggcttttttctggattctcggtgggaacgatccccgcagccgccagcagcggcagggtgtcgtcgaggatacggcctttggacagggcaatggtgagcatggacggttattccttgaagcctgatgttggcgaccttggcgcaggcttggcgaccgggcgccaatctgaaccgcagccgccggctcggtgagcacacggctgcggctcgtgccgatagctagcccggtacgcggcggatcttggcgcccagcaattgcagcttctcctcgatgcactcgtaaccgcgatcgatgtggtagatgcgatcgatgagtgtgtcgccctcggccaccaggcctgcgatcaccagactggccgatgcgcgcaggtcggtcgccatgaccggagctcccttgagcttcggcacgccggtgacgatcgcagtattgccttcgaccaggatctgcgagcccatgcggttcatctcgtagacgtgcatgaagcgattctcgaacacggtctcgatgaccgtaccggtgccttcggcgaccgcgttcatggcaatgaactgagcctgcatgtcggtcgggaacgccgggtacggtgcggtgcggacgttcaccgctttaggacgattgcccttcatgtccagctcgatccagttgctaccggtgtcgatatgggcgccggcctcttcgagcttgtgcagcaccgcctcgagcagggtggcatcggtgtccttgagcttcacccggccgcccgtcgcggcagccgccaccaggtaggtgcccgtctcgatgcggtcaggcatgacactgtagcgaccgccacccaggcgtttcacgccgtcgatggtgatggtgtcggtgcccgcgccggtaatctgcgcacccatggcattgaggaagttggccaggtcgaccacttccggttcgcgggcggcgttttccagaacgctgcggccgttggccagcgcagccgccatcatgatgttctcggtaccggtcacgctgacgatatcgaagaagaagtgcgccccgcgcaagccccctgccggcgcccgcgccttgatataaccgccctcgacgtcgatctgcgcgcccatcgcttcgagcccgcgaatgtgcaggtcgaccggacgcgagccgatggcgcaaccgcccggcagcgcaacctcggcttcgccaaaacgcgccaccatcggtccgagtaccaggatcgatgcgcgcatggtcttgaccagctcatagggcgcgaccagcgtctggatgctgctggcgtcgacttctacgctgagcttttcatcaatgaccggctgcacgcccatgcgaccgaacagctcgatcatggtggtaatgtcgtgcaggtgcggcaggttgcagacggtgaccggcgtatcggccagcagcgtggcggccaagataggcagcgccgagttcttggcaccggagatgcgaatctcgccgttcaggcgagcaccgccggtgatgatcaatttatccatgaatgttcccgtaacccgcaggctcgaagcactggcgaagaggtgccgcgcgcgccatcaggctgcgcagcggctgaaagatatctgccgcgaccggcgatcagcttcgtgcaagccagtcggcctggctgtagaacttcatcgtcacggcgtgaatgctgccatcggcgatccacggattcagatgagcgtagatctgctgctgacgcttcaccggccccagagccgccaagtcgtcgctgatcacgttcaactggaagttgcagccttcgccttcgacttccacctgggcacccgaaagtttttcttccaggaaattcttaacttctacggcctgcatgttcaacctcgatcggcgccggacgcgcgcggccggccatcatacaaaaaagcccaaaggctgcgaaccccgaagccaccccgcctgacgaacacgctcagtcgagggtttcggcaccgttgtcgcgccgcagcggatgacgaccgggagccgaaaccgccgggaaacgagaagaagcgaagcgcaccaccaggatggccaacgccagcaacagaatcgctccggaaatatagacgatgcccatgtcgggggcatgatggtgcgaaacgtcggaaatcaacagccgggtcagcgcagtgatcgccacatagatcagaaaccgcaccggcatgtggttggttttgaaatagatgccaaccatcgcaccgagctcgagatagatgaacagcaacaggatgtcgtcgacgctgatgctgcccttgccgagcatgccgagaaaggtcagcaggccggcccacgcggtgatggcgccgatggcgaacagcgacaggtagtgaaacgtctcgaccagcagattgcccagcgactccgccagaagatgaaccttggctcgcgtcgattcagcccatcgcagcagcatcagacagctccttgtgtttcgtccgctaatgcgaggacgtccagcaggccggacacccgggcgatctctcgcatatcctccggcatgccgacaatcagcacgtcgcggcccgccgccatggcgtcgcgggtaaaggccagcagcagcgaaagcccgacgctgctggatttctccaccccgctgcaatcgatcagcacccgctttgccttgctgttaccaatcagctcctgaccggcacgacgcagggccggcccggtctggtagtcgagcacgcccgagagacgcagctcaccctcggcgccgctctggacgaacgcctcactcatcgcccgccgcccgctgacccgcctcggtatccttggcgcgtgcgacaacttcggcccagccatcgatggtcttgtccaggtcaccaccgttcttctgcatggcatcggcgaactggtcgcggaacagcttgccgatattgatgccgttgatgatcacgttgcgcacgcgccactcgccgccctgattgaccatcgtgtaggacaccgggtagatctcaccctggcggccggtgacttccatgccgacgctggtgcgctcggcgtcctgcttgtcgctggccggcagcacacggatttgctggttgttgtattccagcagggcgttgccgtagaactgcatgaggctgcgcttgaagttctcctggaagcgcgtcatctgctgagggctggccttgcgcgagtacttgacggtcatgatgctgcgcgagatcccctcggcgtctaccaccgggccgaggatttcgttgagcgagtcgtagaacgcgttcgggttctgccgatactgttccttgttggctttcagatcggcgagcaactcgtcggtggtcttctggatcacttcatgggcgcttggagccgctacggccagcatgggcagggcagccagcaacaccagcagaccacgacgcagaacagtcatcatgtggatattcctcattctttattgaccgaattgagcaaaaacttgccaatcagctcctcgagcaccagcgacgattgagtgtcgcgaatcgtatcgccttcgcccagggtctcctcttcaccgcccacgctgataccgacgtatttctcgccgagcaggccagcggtcagaatcgacgccgtggaatcgaccggcaggatgtcgatgtccttctggatttccagtgtgacgcgcccggtgtaactctcgcgatccagatcgatcgcggtcaccttgccgatggtcacgccggccatcgtcactttggatcggacactcaatccggcgatattgtcgaaataggcgtacaacttgtaggtgtcgctgctatcgacgttcaacccactgacccgtagcgacagcagcaatagcgccaggaggcccgccaggaggaataggccaacaccgatttcaagggtgcggatacgcatcaaaaatctccaaacatcaaggcggtcagaataaagtcgagaccgagcaccgccagcgaggcgtacaccacggtccgcgtggttgcgcggctgattccttcggatgtcggctcgcaatcgtagccctggaacaccgcgatccaggtgaccacgagcgcgaacaccaggctcttgatgacgccattgagcacatccgaggtgaaggtaacgctgttttgcatgttggcccagaacgagccctcatagacgcccagccagtccaccgccaccatcgccccaccccagatgccgaccacgttgaagatcacggtcagcaacggcaaggaaatgaagcccgcccagaggcgtggcgcgatgatgtatttcagcggatcgacaccgatcatttccaggctggacagctgttcggtggacttcatgttgccaatttcggccgccagcgcggacccggcccgcccggcgaacagcagcgcggtgaccacgggccccagctcgcgcaacagcgtcagggcgaccatctgccccaccgcctgctccgaaccgtagctgctgagaatactgtagccctgcagggcgagcaccatgccgatgaagacaccggagaccaccacgatcgccagcgacagcacaccgaccgaatagagctgacgaaccagcagggcgaaacgattgctcagaccgctggggccaaacagggcatgaaagagaaacaacgtcgcacggccctgcgccgcgaccacgttgatcccagcctcgccaaacatccggattcgctcgatcaatgaacgcttacgcatcgggacctcgcagcagatcctcggcataggccggcgctggaaaatggaaaggcaccggaccgtccgccgcgcctttcatgaattgctgaatccgcggattgctcgattcgcgcagctcggccggcgtgccctgccctagcacctgcccgtcgccgaccacataaatgtaatcggcgatgctcgctgtttcggccaggtcgtgagagaccacgatgctggtgatccccaacgcatcgttgagcaatcgaatcaattgcaccagcacacccatcgcgatcggatcctggccggcaaagggctcgtcatacatgagaatctgtggatcgagcgcgatcgctcgcgccagcgccacacggcgcttcatgccgccggacaactcgtcgggcatcagttcgaccgcgccgcgcagccccaccgcctgcaatttcatcagcacgatgtcgcggatcatctcttccggcagcttggtatgcacccgcagcgggaacgcgacgttctcgaagacatcgaggtcggtgaacaacgcgccgctctggaacagcacgcccatctgcttgcgcatgtcgaacagctcacggcgcgacagcgtcggcaggttggttccggccacccagacttcgccactgttaggcctgagctgcgcggcgatcaagcgcaacagcgtggtcttaccgcagccggacgggcccatgatggccgtcaccttgcctcgcggtatgacgatgtcgatattgttgaaaatgctccgctcaccgcgcatgaaggtgacgcccttcagctcgacggcgttagcgttggcggcgctcatcggttctccttggatacagcctgcgaatcagacgcgctccgaacaggcggagatacttcgcagagccgtttggcggcgcgaactatagcaccgcccagagggcctcccaaacaggggcctgtatcgaggcatgagcgagcgcacattcgttcagcttcggttcagctccagccgatgatggacctcgatcgctttttcggtgagcggtgccgggtttaccgttataatctcgcgttttcattcaagcgatgacgtgaacatgagtcagagcaatcatctgatcgagaccgccctgcgtacgatcggcatggaaatcgaggcagtcgagcagctcaagacccgcatcgatgcgcagttcgtcaaggcatgcgagcttattctgcattgcaagggccgcgtcgtcgtggtcggcatgggcaagtccgggcatatcggcaacaagatcgccgctacgctggccagtaccggcaccaccgctttcttcgtccacccggccgaagccagtcacggcgacatgggaatgatcacccgggacgacgtggtgctggccttgtccaactcgggctctaccagcgaaatcgttaccctgctgccgctgatcaagcgcctcgggattaccctgatcagcatgaccggcaaccccgaatccgtgctggccaaggcggccgcggtcaacctcgacgcgagcgtggccatcgaagcctgcccgctgaacttggcacccacgtcttcgaccacggtcagcctggtactgggcgatgcactggcgatcgccctgctcgaagcccggggctttaccgccgaagacttcgccttctcgcatccgggtggcgcgctgggccgacgcctgctgctcaaggtcgaacacgtcatgcacactggcgaccgcctgcccctggtcaaccgcggcacgccgcttcgcgaagcgctgctggagatgacccagaaggggctcggcatgaccgcggtggtggagacggacggaagcctggccggtattttcaccgacggcgatctgcgccgaaccctggataaaggtatcgacgtccgccaggccagcatcgatcaggtcatgaccctccacggcaagactgccagcgccgacatgctcgcggccgaggcgttgaaaatcatggaagacaacaagatcaacgcactggtagtggtcgatgacaacgaccgtcccataggcgcgttgaacatgcacgatctgctgcgcgcgggagtgatgtaagtgaacgatctactgaggcgtgcccgcgacattcgcctggccattttcgatgtcgatggcgtgctcacggacggcaagctgtatttcctcgtcgacggcagcgagttcaagaccttcaatacgctcgatggtcatggcatcaagatgctgatcaattcgggcgtgcgcaccgcgatcatcagcggacgcaagacaccggtggtcgagcgacgcgcgcagaacctgggcatccagcacctgtatcaggggcgcgaggacaaactggtggtgctcgatgaattgctcgccgagctgggactcgactacgctgaagtcgcctacctgggtgacgacctgcctgaccttccggtgatccgccgtgttggcctgggtatggccgtcgccagtgccgacgcgttcgtccgccagcatgcgcacggggtcaccgctgcccgtggcggcgagggcgcggcacgcgaattctgcgaactgatcatgcgcgcccaaggcaacctcgaagctgctcaggccgcctacctctagaggtttttccatgctgagcagactccgccttcctgccgtcctgctgctggtcgccctgctgctggtcgcgatcggttactggaacatccgccccgaaagtttcatgcaggagccgcctgcaagccagggcggagagtcatcgatcgatttctacgtgatcaactcgcgcacggtgcaataccaaccggacggcaagcgcaactacgaactctccgctgacaaggtcgaacacatcaaggccagcgacgtcagcctgctgacccgtcccgacctgcacgcctacaggggcaccgatctgccctggcacgtgaccagcgagcgcggcgaagtgggcccgcaaggggaacaagtcgagctgatcgacaacgtcaaggtccaacggcaggacgccaagggccgcccgaccgagatcaccagcagccggatgacggtgtttcccgagaaggattatgccgaaacccggcaacccgttagaatcgtcgccgcaaacggcgtcacgaccgccacgggcatgaaagcgtacctagatgaaggcaggatgctcctgctatccaaagtaagaggccagcatgagctgcgttaagacaatcccctacctgatcggcctgagcatcgcgctgctcggctcgtacgcccatgcactccctgaagaccgaaaccagccgattcgcgtccaggccgacaccgccgaattggacgatcgacagggcgtggccgtctatcgtggcgacgtggtgatcacccagggcaccatgaagatcacgggtgacaccgtcaccattacccagaacaagaatggcgatgtcgaggtgttcacatccatcggcaagcctgcgtattacgaacagaagccagcggtggacaaggagatcgtcaaggcctacggcctgaccatccagtatttcgcgacgaacgagcggattgtgctgatcgaccaggccaaggtcgttcaagaaggtaataccttcgagggcgagaagatcgtctatgacacccagcgccagatcgtcaatgccggtcgcgccagcaatgccgacatcaccacaccgcgtcctcgcgtggacatggtcattcagccgcgcaagaaagatcagccggcaaccgagcagggcaactgatggcgattctcaaggcccagcatctggcaaagagttacaagacccgccaggtcgtgcgcgatgtcagcctgtccatcgagagcgggcagatcgtcggcctgctcggaccgaacggagccggcaagaccacctgcttctacatgatcgtcggcctggtgaaggccgaccaaggccgcgtactgatcgacgagcaggacgtcacccatctgcccatgcatggtcgggcccgagccggtatcggctacctgccgcaggaagcctcgatctttcgcaagctgtcggtgaccgacaacatcatggcgatcctcgagacccgcaaggacctggatcgcagtggccggcaacaggccctggaaagcctgctgcaggagttccacatccatcacatccgtgacagcctgggcatgagcctgtccggcggtgagcggcgacgcgtcgagatcgcgcgcgcgctggctaccgcacccaaattcattctgctcgacgaacccttcgccggcgtcgacccgatctcggtcggcgacatcaagcagatcatccaccacctcaaggccaagggcatcggcgtgctgatcaccgatcacaacgtgcgcgagaccctggacatctgcgagaccgcctacatcgtcaacgacggtcagttgattgccgaaggcgatgccgagacagtcctggccaaccagttggtgaaggatgtgtacctcggacacgaattccgactctgacgccgatcttttcggccgatagccccgttaggggctaggcaaacgcttcgttggcaggcatataatttgcttatgcaggcgcccccaggcgccagtgaatcggaacaggcgcggttgcgccggcaaacaaggttcgaagtcctctgccatgaaaccatcgctagtcctgaagatgggccagcagctgacgatgacaccgcagctgcaacaagccatacgattgctccagctatccacgctcgatctccagcaggagattcaggaagcactggattccaacccgatgctcgagcgtgaagaagacggggacgacttcgacaattccgacccgatggccgagtcgatcgaaaggaagtcggaaagcagtcagaacgagcaaagcgagcctgacaatcacttcgaagaacccatcaacacggtcgaaaacctcgaggaaggcgactggggcgagcgcatccccaacgagctgccggtagacaccgcctgggaagatatctaccagaccagcgccagcagcctgcccagcaacgacgacgacgaatgggacttcaccacccgcacctcctccggggaaagcctgcagagccatctgctctggcagctcaacctcgccccgatgagcgacactgaccgtctcatcgcgaccactttgatcgattgcatcaacccccaaggctatctcgacgagaccctcgaagaggtcctcgaatccttcgatcccgaactcgagatcgagctcgatgagatcgaagtggtgctacgtcgcatccagcaattcgaacctgccggaatcggtgcgcgagacttgcgtgaatgcctgctgctgcagctgcgccagctccccgagcgaacgccgtggctggccgaggcgatgcgtctggtgagcgatcacctggacaccctcggtggccgagactacagcctgctgatgcgtcgcttgaagcttaaggaagatgagctgcgccaggtcatcgacctgattcagacactcaatccacggcccggctcgcagatcgaggccggcgagccggagtacgtcgttcccgacgtgatcgtgcgcaagcacaatggccgctggctggtcgaattgaaccaggaggccatgccacgcctgcgggtaaacccgcagtacgccggcttcgtcaagcgcgccgattccagcgccgacaacaccttcatgcgcaatcagttgcaggaagcgcgctggttcatcaagagtctgctcagccgcaacgaaacgctgatgaaggtcgccacgcagatcgtcgagcatcagcgcggctttttcgaacacggcgacgaagcgatgaagccgctggtgttgcacgatatcgccgaggcagtcggcatgcacgagtcgaccatctcacgggtcacgacgcagaagtacatgcacacgccacgcggtatctatgagctgaaatacttcttctccagccacgtgagcactgccgaaggcggcgaatgctcgtccaccgcgatacgcgccatcatcaagaagctggtggccgcggaaaacgccaaaaagccattgagcgacagcaagatcgctggtttactggaggcacaaggtattcaagttgcacgccgcactgtcgccaagtaccgcgaatcactcggtatcgcaccatccagcgaacgtaagcggttgatgtaaatgccaggcgacctggtcgatctcttccggtggcgggcgctcagccccgccaattcgcaagtggcaaaaaggagatgcagtatgcaagtcaacatcactggccttcacctggaaattaccgatgccctgcgcgactacgtcgaggagaagttcgaccgactggaacgtcatttcgaccgcatcattgccgtccaggtgatcctgcaggtcgagaagctcaagcaaaaggcagaagccgccctgcatgtggccggccgtgaagtcgtcgcgaatgccgagcacggagacatgtacgctgccatcgacctgctggtcgacaagctcgaccgtcagctcatcaagcacaaagaaaaacagctcgaccataaccagggcgcccttgctcgctgacccaatcatgatccgaatcgaaaacatcctgacccccgggcgttccctggtgaacgtcccgggcggcagtaagaaacgcgtcctggaacagatcgccaaagtgctaggccaggacctcccagacttggactcgcaaaccattttcgaaagcttcatcgcccgtgaaaaactggggtccaccggtttcggtaacggcattgccatcccccactgccgtatgcctggctgcacatcgccgctgagcgcggtgctccggctggacgttcccgtggatttcgatgccatcgacggcgcgccggtcgacctgttgttcgtgctgctggtgccagaggccgcgaccgatgagcacctcgaactgcttcgtcagattgccagcatgctggaccgtgaggacgttcgtgagcgtctgcgccgggccagcaccggacaggagctgtatcaggccgtcgtcgatattcagagcggccggtagcgcagcggtctgcgccgggctgagtgaggaaagagacgtggtttctagctgtcaacaaccgccccttcagcgccgccctgggcacgtagttcgcgccggcgccccgtccaacaccctgcaccaatgcgcctgatcatcgtcagcggccgctccgggtcgggtaagagcacggcgctcgacgtgctcgaggacaacggtttctattgcatcgacaacctgcccgccggtctgctgccggaactggcggagcgggcactgctgcatacggagctgctgcagccgcaggttgcggtatccatcgacgcacgcaacctgcccagccagctcaagcgcttccccgagctgctcgaggatgtccgcgcccgttatatccagtgcgatgtgttgtacctcgacgccgcggacgagacgctgctcaagcggttttcggaaacccgtcgacgacatccgctgaccaatcagaaccgctctctggccgaagcgatccacgacgaagaactgctgctggcgccgatcatcgatcacgctgacctgaaaatcgacacgacgcacctgaacctctatcagctgcgtgacaccttgaagctgcgcctgttgaaccagccagaaccgggtaccgcctttctcttcgagtcctttggcttcaagcgcggcatgccggtagacgccgacctggtgttcgacgtgcgctgtctgcccaatccgtactggaaggccgacctgcgggacttttccggcctcgaccagccggtgatcgattacttggccgcgcagacggatgtcgaagagatgttccaggacatactcgcctacctgagcaaatggctcccacggttcgctgccagcaatcgcgcctatgtcaccgtcgccatcggctgcaccggtgggcatcatcgctcggtgtacttggccgaacggctgggccaggcgctgcgcgaacccttgaagaacgttcaggtccgccatcgcgacctggcttaggaattctcatgccatcgtgcgaagttaccatcatcaacaagctgggcctgcatgcccgagcggccgcgaaattcgtcggcgtcgccaaccagttcccctgtgacatccgcgtcggacgctgcccggcgagcctggtcgacggcaagagcatcatggccgtcatgatgcttgccgccagcaaaggaaccacgctgcacctgcatgcggagggcgaacaggatgacgacgcgctctctgcgctgatcgccctgatcgagaactacttcgaggagggagaataaagctggcagtcggtatatcggcggcgccggagcatcgccaagcccgtccctttactcctcagcacgccggctgcttcttactgccccgccaccttcatccgctcgatcagcaccgaaccggtgtgaatgctgctgcgtgtctcgatatcgcagccgaccgcaacgatctggcggaacatgtcgcgaaggttgccggcgatggtgacttcctgcaccgggaactggatctcgccgttttccacccagaaaccgccagcaccacgcgaatagtcaccggtaaccaggttcaagccctgccccatcagctcggtcaccaataaccctcgacccatacggcggatcagcgccgcctgatcctcgtcgccatgggtgacgaagagattgtgcacgcctccggcattggcggtactgggcatgcccaacttgcgtccggagtaggttccaaggacgtaggaaagcaacttgccgttctccacgaatggcttggcgtaggttgccaggccgtcgccgtcataggccgagctggccagcccgcgcgccaggtgtggacgctcatccagactcagccactcggggaagagcatctgtcccagcgcaccttcaaggtacgacgacttgcgatagagattgccaccggaaatcgccgcgagaaaatgaccgaacagcccggtggccagctcggaagagaacagcaccgggacatcgcaagtcggcacaggccgtgcacccaaccggcgaacggcgcgttcggccgcacgtcggccaatcgattcagccgacgccaggtcaccggcaacgcggctgacgtcatagtgataatcacgctgcatctggccatcagcctcggcgatcatcacgcagctgaggctgtggcgagtactgcagtaggcgccgatgaagccgttgctgttgccatacccacggcagccctgatgcgtgctcagactggtaccgtcggcgttgcggatgcgtgggtcggtatcgaacgccgccgcttcacagctgagcgccagttcgacggccgcgtcgggtgaaatcccccagggatggtacagatcgagatcgggcacctctttggccatcagcgctggatcggcgagcccggcgtattcatcttcggaggcatgccgagcgatcgccagggcggcggccacggtttcacgtatcgcgtcctcaccgctgccagtcgtgctggccgagcctttgcgctggccgacgtagagtgtgatgccgaagccctggtcgcgattgaactccaccgtttccacttcacgctggcggacagtggtcgacaggccttgctccatcgacaccgagacttcgcaggcgctggcgccctggcggctggcctcttctatgattctcgagaccttctcgcgcaatcccggcagcgcactcggcccgatcccctcgacttcactcataaacactccaactgattcgatcatgctgcctccgcggagcccgactgagctgcaccgcgaggctgctgttatcatggtgacgtttccaactggaccagccccatgtctgatatttccgatctcgacggcttcgaggaaaaaagcaaaacccaggtcaaacgtgagctgcacgctctccaggagctcggcgagcgcctcaccaccctcaagcccgacgtgctagaccgcctcccactcaccgatgccctgcgcaaggcgctggccgatgcgcccaagcacaccgcgcacatcgcccggaagcggcacctgcagtacatcggcaagctgatgcgcgaccaggataccgacgccatcctcgcgctggtcgaccagctcgacgcctccacccgccaatacaacgagcgcttccatgcgctggaacgctggcgtgaccgcttgattgccggcaacgatgaaacgctcgaatccttcgtcaacgagtttccggagaccgaccgccagcatctgcgtgggctgatccgccacgcccagcacgaagcggcacataacaaaccaccagccgccagtcgcaagatattcaagtacatccgcggcctggacgaaacccagcgcgggctgcgctgaaaagcggctgcacgctacaggctccaggcggcgggcaaagcggctgcaccgctggcccgaagcctgaggccctcaggcgcctgtcccgccaaccgtaatgccatcgatcttcagcgtcggctgaccgacgcctacaggcaccgactggccgtccttgccacaggtgcccacgccactgtccagcgccagatcggtgccgaccatcgaaaccttgttcatcacctccggcccgttgccgatcagcgtggcccctttcaccggcgcggtgatacggccatcctcgatcagataggcctcgctggtcgagaacacgaacttgccgctggtgatgtccacctgaccaccgccgaggctcgcgcaatagatgcctttcttcaccgagcggatgatttcttccggatcgctctcgcccgccagcatgtaggtgttggtcatccgcggcatgggcaagtgagcataggactcgcggcgaccgttgcccgtcggggcgacgcccatcaaacgcgcgttgagcttgtcctgaatgtaacccttcagaatcccgttctcgatcagcgtggtgcactgggtcggtgtcccctcgtcatcgacgctcagcgagccacggcgattggccagggtgccgtcgtcgacgatggtgcacagcttggatgccacctgttggccgacccggccgctgtaggctgagctgcccttgcgattgaagtcgccctccaggccgtggccgaccgcctcgtgaagcagcacgccggaccagccagaccccagcaccaccggtaacgtaccggcgggcgcggcgaccgcctcgaggttgaccaatgcttgacgcagcgcctcgcgcgcataccccatggcgcgatcttcgctgagaaagtagtcataaccggtacgcccgccgccgccatggccgccgcgttcgcgacgcccgttctgctcgacgatgacgctgacattgaagcgcaccagcggccgtatgtccgccgccatcccgccatccagaccggcgaccagcacatgttcccagaccccggcaaggctcaccgtgacctgcttgatgcgggggtcgagcgcgcgcgtggcgacgtcgatacgcttgagcaactcgactttttccgcacgacccagcccatcgagcgggttgtccgcgctgtacaacgcgccgaaagaagccttcgacagcacctggacgcacccttgctggccactgcgtgcaatcgagcgagcggcttcggcggcctggcgcaaggcgtcggcggtgatcgcattgctataggcaaaaccggttttctcgccggacaaggcgcgcaccccgacgccttgctcaagatggaaaccgccttccttgacgatgccatcctccagcacccaggactcggtcacctggtcctggaaataaagatccgccgcgtcgataccgggaccggccagctcgccgagcagtcccggcaggtcatccaggccgagcccaccaggtgtcagcaggcgctcggtgacaggtaacagcaattgactcatatctactccaaagtgcccgagacaatacggggagtggtgaatcggcgatgcatcacaaccggcatgcgttgacgcatcgccgtctgtgcggccgtgtcccggtcgacgaccagaaccgcctcgccggttgcctgctcggccaacacctgtccccagaaatcaacgatagacgaatggccgtgggtcatccgtccgttcgggtgttcaccaccctgcgctgcggccagcatatagcattgcgtctcgatggcccgcgtgcggaccagcatctcccaatgcgcctgaccggtgaccgccgtgaaggccgagggggcgctgatcagctcggcgcccgccagacgcaacgcggtatagagttcggcgaaacgcaggtcatagcagacgctcatgcccagccgcccaaccggcgtatcgaccaccaccagccgctcacctgccgcgtagtcgtccgactcgcgatagcgccctcgcgcatcgctgacatcggcatcgaacagatgcagcttgtcgtaacgggcgacacgctgcccatgatcgtccaccaacagcgagcaggcccggaccttcgccagcggttggtcatccggcggcaatggaatggtgccggccacgatccataagctgaggtcgcgggcggcctgtttcaaccagggcaggatcggaccggctccctcggcctctgcccgcccgagcgcaaccaggtcggagcgtcccatggcggcgaaattctcgggcagcacagcgagtcgggcgcccgcctcggccgcttgctccagaagcctccgcgcggcgacgaggttcgtctggatgtcggtctggctgaccatctgaatcacggctagggtcatgcttggctacccctggggcgctgtggccgccggctgaatgacgctcagttgggtttctcgaagggcttgtcgaaggtgattttcggtgcctgccagggcccctcgacgttgtactggacggttgcgaagcgagccaccttgtcgcccagcagcttgtcgacgacgaacagcgcaccgccaatggcgggtgcgcccacgatcagcgcggccagcggcaggttattgctgaccggaagcgtcaccagcagcttggcatcgatctgatcgttgaccagatccaggcggccattgagttccagattgctggagggccctgccaccgtcagcggttgcgacgtcacgtagacaccgtcggttgcctgcaactgggccttgatccgatcgtagctaagccccttgctgaacaggtcggagaaatccaggcgcaagcgccggccgatggagtcgaaattgagcagaccgaagactcgcagtgcctgcgccccgccatccacttcacgcaactggcccttgcgaagccgagcatcgagcgtgccggacagccggttcacggcgaaaaacgctggcgaaccgggccagctaccgtccacatccagccggaaatcctggctggacgtcgagggagcgaacccccaggccaacagcacgtcggcgatattcgcgccctccagccggcccttgtaccagctgcgcgaaccgctccagccgccgctaccagccatcttcaagcctttgagattcaggtcgatgtcggagaagcctacaccctcggcatccggtcgcatcttgaacgacccgccgcccagcaactcgtcaccgcgcaagacttccgccacgctgatgttcatcgccgggagctccttcggatcgacagcggccagtgcatcgcgaggcggggtctgcgcctcatcggtggccgcagccggcaggcgcacgcgcgacaggtccagcacgatcggctcgctgtcggcgtccggcaactggacggatccggccaccgtcccgctgtccaggccgagcgaccagcccgccggaaggcgctgcaggacgacacccagatcgtcgatgtgagtaccgaagccctcgaaggcaccgatatgcagctcgacctgacgcaacatcgaggctcccgcctgattggtcgagcgttcaccgtagtctttcagcagcgcttgccattcgctcagatcgaagcgcgagacgctgccgcgcacgtggaggcctcggtcggtgcgcaggttcgccgcagcaccacccagcaccagctcgccgccgccctcggaccagttgccggtcggcgcaacgaagctcagtgccgccaacgcgccgtgcctgagcgtatatcgctgacgctcgccgccaaacgacatgcgcagcgtcgtatcgcgccgttcatctgccgttttgtcaaacggcgctggaagcgccagttcggtacccagcagggaggagtccacctgcaggttgttatcgatacgactcagcaacaggttcagccggagcggcagcgttccggacgcgggcagtggccgttctatctttcgccagcccaggagccgttgtagcggcacgactaccgacgcctcgatacgcgacgcgggctcgcctgcctctcccagcgcgacggccttgccctgcaccgaactgcccagggttcgcgcatggaacgccttgctgctgaagccgcgctcgctgtcgtagcggaactcgcctgccagcgcatcgagctgcaggtccgcctgaggaatgaacaacgaggcatcgctactggcgaaatcagccagcaccacgggacgctcacctttggccagcggaatgtccaggcgcagggttccgctcaacggaccatcgccacgccagccagcgaacagctcgcccgtaccgatcggcgccacctgcatcagggtcaaggcatcgcgcagatgaccgtccacccgcccctcgatagccagccgcggcggttgtccgccgtgccgatgggggatctcggcgctgacgtcacgcacctggctgtcgagcatgcgggcctcggccacgcgaacccgcacacccgtgttctcgatcagcacttccccgcgcccttcgcgcagcaccggccaaccgggttggaacgcgagctcggcgtccttcaccttgaagtaaagactcaggctgcgagcggccgcctcggcgtccttgctcaacgcgccctggtattcgaagtagccctgctcgacgcgaccgccacgaatcgcggccagcagccattcactcaacgcgggattcagcgcgggcgaacgcgttggcagatatttttcggtatagcgcgcgtcgccattgctgagcccgacgcgcaggtccatgtagtcctcggcagccggatcgcgcatcaggcggatcaggaaatcccccgcgatctgcccctcctcgccctcgacctgcagataaggcgcagcaagggttatcgcctggtcatccagcgtccagcgcaggttgccgcgcgcccggtggtactcccagggctgcgggaacagctcggccaggtgcagcgcgaaatcgcggttatcgaaacgcagctcccctccggcgaggttgccctgtaccacgccactgacattacgcacggctggcacccaatggtgcgcagcgatgccgaccgcgtcgagattggctgagaacgccagccgttcctcggcgggcgcggatgggcggtagtcgatctgcaggttgcgcaaggttccgctcggcgccaaccccagcaggtattcctccgcccgttcgggcaatggccacatggcatgggccagtgcggccatgggcgcaacggcaaggcgatcggcctgcaggcgccagcgcccctcggcaacgctctgctggagcagcagcgtggtgtcctgccaacggttctcttcgaaggtgaaggccagaccattgagctgcaaccggtagccatcatcggcgcgatcgagataagcgttgaccgccaggtcgtctatcgacacgaggccctgctgctgccgcccaaggcgcaaggacggcgcgttcagtcgagccaccgcgcgggccagcccccgctcacgcaactcgagccagacttcgccaccggctcgaagctgcgcgagttcccagtcaccgagcagactcgccggcagccagctggcccagtcgctctgcggcaggctcagataaagctcggcttcgctgctttgccagtccggcacctgtagcttcgtctgggcacgcaggctcaagggctggccgtccggcagcagcacccggccatccagccgcagacgctcgccgacgacaccgagtgcgaggttggcataggtcagggtaagcggcgccgcagcatgcgcctggaacgtgatctgactatcgcgcagctgcacttgccggaccctgcgcagctgctcgaaaagcttcgcaacgtcgggtggaggctgatcaccgcgctcaggcagcccatcgacgtgccacttgccatcagcgttctgcacgaggctcaactgcaggccggagaaggccaggctctcgaggcgaggctggcgggacgaaaggctgcccatgacatccggcaccaattccagccggtccaggcgtatcgctgcatcgccgtcgccgaggatcacatcgtgcgccaccagccgcggcgagaacccttcccaatgcccctccaggctaccgagttcgaccggcatcttcagtaagctgcgcgcctggtcctgcacctcggcgcggtactcggcaaccagcggcaccagctgccggccgagactcacgtagagcgcaagcagcatcaagccgatcgcgcccagccagagacagcggcgcaagaaggcgagaacaagggccaggagccgactcatagcgctgcgctccgttcatccggctccggatggccaggtgagcatctattcagagcagcaccacgtcgtactgttcctgggaatacatggtctcgacctgaaacttgatcgagcggccgatgaagctctctaggtcagcgacattgccggactcctcgtccagcagacgatcaatgaccttctggttcgccaggacccgatacccctcgggctggtaggcacgggcttcacgcaggatctcgcgaaaaatctcgtagcagaccgtctcaggggtcttcagcttgccgcgaccctggcagcacaggcagggctcgcacagcacctgctcgaggctttcgcgcgttcgcttgcgagtcatctgcaccagccccagctcggtgatgccgatgatgttggtcttggcgtgatcgcgctccagctgtttttccagagtgcgcagcacctgccgacgatgctcctcgtcttccatgtcgatgaagtcgatgatgatgatcccgccaatgttgcgcagccgcagttgcctggcgatggcggtcgccgactcgaggttggtcttgaaaatcgtctcttcgagggtgcggtgcccgacgaaagccccggtgttgacatcgatggtggtcatcgcctcggccggatcgatgatcaggtatccgccggacttgagcatgaccttgcgttcgagcgccttctggatctcgtcctcgacactgtagagatcgaagatcggccgttcacccgggtagtgctccagatgctcgctcagctccggcatcagctcaccgacgaactggctgaccttctgataattttcccgcgagtcgatgcggatcttttcgatacgcggattgaccaggtcgcgcagcgtgcgcatggccagcgacaaatcctcgtagataatcgagggcgcgcctgcggtcttcatctgcccgtcgatctgttcccacagacggcgcaggtagcggatatccattaagatctcgtcgctgccggcgccctcggcggcggtgcgcagaatgaaaccgcccgcctccttgatgccttccgccgcaatgcactcggcaaccacctgcttgagcctgtcgcgctcggcttcgtcctcgattcgcagggagatgccgacgtggctggtcttgggcatgtacaccaggtagcgcgacggtatcgacagctgcgtggtcagccgcgcccccttggtgccgatcggatccttggtgacctgtactaccagcgcctggccttcatggaccagggcactgatgggctcgaccgcgttgccttcgcgactggatatttccgaggcgtgtatgaaggcggcgcgctccaggccgatgtcgacgaaggcggcttgcatgccaggaagcacccgcaccaccttgcccttgtagatgtttccgacgatgccgcggcgctgggtgcgctcgacgtgcacctcctgcaggacaccgttctccaccaccgccacccgcgactccatgggggtgatgttcatcagaatctcttcgctcattgttgttctcggctgatggcggaggggtatgccaggctgtaaaaaaactgcttacaaacgggcggcaacgatagcccggtggactgctcatcgaagcagaccgcaccgctgcggctgtgcttgccttgtctcgcctggctcacctgcgttttatgacctgttagcagccgaagctgaccggttgtctcgattctaacggcataagcggccaagccccaggctctataccgagcttttacaccagtaacgcagtccgtaggcctcgagcaactgagccgtttcacacagtggcagcccgactacggcggaataactgccctcgagcgagctgacgaacaccgcgccccaaccctgaatagcgtagccgccagccttgtcctgcggctcgccgctcgcccagtagcgctcggcttcgtcgacgccgatcggacggaagcgcacccgactgcagaccagacgcacctcacagcccgccccattggccagggcaatggctgtcatcacttgatgctcgcgccctgataaggcctgcagcatcgccagggcgtccgccttgtcggccggtttgccgagtatctgttgatccagcaccaccgtggtgtcggcaccgaggacgcaagccgagtcttgatcgacctgcgccaagcccgccagggccttttcccgggccaagcgctggacgtatgcgtcaggcgcttccgccatgccgggcgtttcatcgatggaaaccgaaagaagggagaacggaacgccgatctgggtcagcagttcacggcgtcgcggggacgcggaggcaagaaacaatgcgggcatgccggctcctggaaatgaaaagtgcggagcaggttcgcatatccaggcaggcctcggaagcagaccaacgccggccttcggcacgtcagtagacgttgaaacgccgccgcacccattgcaaggcgatgaagacccagggccaaagcaaggcactgaccggaacggggacgaggaacagcagtgtcggggggcgattgccggtcagcgtgttcagccaaagctggaccaactggccgagccccagaatcaccatgagcaccaggctctgctgcagcaagggaaacatgcgcaggcgctgttgcaggctgagcacgaggaaggtgctcaggatcagcggtagcccgttctgccccagcagggtgccggaaagcacatcgagcattagtccgaagaagaatgccgcgcccataccgccgcgatgcggcaaggtaatcgcccagtaggcaatgaacatgccgagccagagcggacgtgccaacccgaaactttcgggcatgggcgccacgctgagcagcaatgccagcaacagcgacagccagatgacccaaccgttattcagccgcccgctgatcatggtcgcccctcgcccgctggcgccgttacatccggcgcaggcgccgcggctggggtttgcgtttcgcttgccggcgcagccggctcggtgatcgcctcggcggcctcgcgatcggccgactcctgcgcctgcgccgcagccgtggcgcgctcctccggcgtacgcgaatcactgaagaccagcagcaggtagcgacttcgattgagcatcgcagtgggaatggcgcgaacgaccaggaaaggttgccctgagccgcgtaccacctcggtaacttgcgcgaccgggtagccgcttggaaagcgctgccccagcccggagctgaccagcagatcaccctccttgatgtcagccgtctcggcgacgtggcgcaactcgaggtaatccgggctgccggtgccgaccgcgatcgcgcgcagtccgttgcgattgacctgtaccgggatgctgtgggtaacgtcggtcagcaacagtacacgcgcggcgtagggcatgacttcgacgacctgccccatcagtccactggcgtcgagtaccggctggccgagaaaaacgccatcgcgctcgcccttgtcgatcaggatgcgatgggtaaaaggattgggatcgagcccgatcagttcgctgacgatcaccttgtcgtccaccagcgcggccgagttgagcagttcgcgcagccgcacgttctgctcggtcaacatcgcgagcttctgcaggcgccgctgcatcagcagcgcttcggccttgagcttctcgttctcggcgaccaggctggtgctgctgctgagctgctcggtcgcgcgctgccaggtgcgtaccggcaggtcggccagccagtagaacggggtcagcaccaggcccatctggctgcgcagaggcttgagcgtctcgaagcgcgcatccaccaccatcagcgcgacacaaagcacggagagcaccagcaggcgcacaccgagcaagggtcctttggcgaatagaggcttgatgggcggttcctcgcagctaccggcttcaaactaacgcgacaagccgagagcaggcgcagggcttgctgtcggcttgtgcttggagctcatcgcttggagatcactccgtggacagcaggtccatggcgtgacgatccatcatttccagcgcgcggccaccgccgcgggcaacacaggtcagcggctcttcggcgacgatgaccggcagaccggtctcttgcgccagcagcttgtccaggtcgcgcagcaacgcgccgccaccagtcaggaccagaccgcgctcggcgatgtcggaagccagctccggaggcgactgctccagcgcgctcttgaccgcctggacgatggtcgccagcgattcctgcagcgcttcgagcacttcattggagttgagggtaaagctgcgcggcacgccctcggccaggttgcggccgcgcacgtcgacttcgcgcacatcgctgctggggaacgcggtgccgatttcctgcttgatgcgctcggcggtggattcgccgatcaggctgccgtagttgcggcgtacgtaggtcacgatggactcgtcgaaacggtcgccgccaacgcgcacggattcggcatagaccacgccgttaagggagatcagcgcgatctcggtggtgccgccaccgatgtcgaccaccatcgatccacgcgcttcgtcgaccggcagaccggctccgatggccgcggccatcggctcttcgatcagaaagacttcgcgcgcgcccgcaccgagcgccgattcgcgaatcgcccgacgctcgacttgcgtggatttgcaggggacgcagatcagtacgcgagggctgggctggagaaagctgttctcgtgaaccttgttgatgaagtactgcagcatcttctcgcagacgctgaaatcggcgatcacaccgtctttcatcgggcggatggcgttgatattgccaggggtccggccgagcatgcgtttggcgtcggtgcccaccgcgacgacacttttctggttgccgtgagaacgaatggcaacaacggacggctcgttcaggacgatgccgcgatcgcgcacataaataagggtattggcagtgcccaggtcgatcgacaaatcgctggaaaacatgccacgcagtttcttgaacatggagaaagggccctgaggcaaacgcgtggggaaaaaagtgccgcaaactctaacaatggtgcgaacttagggcaaggcgcacgtcggcgcacgtggacacagacgtgagccactgcgcggaaaacgaacgatggcgacagctttgtcgaaccgacgccagaccgcagccatgctaccgacaagcgccgcggacatgtaagattggcggcttttccgggctctaatgcccgccgccgcggctcgaccccgctgctcttgtgtcggtctttgccgacggaaggcatatccgactcgcttcccgctggagaatcccgatggcgcttgaacgctccgaggtggaaaagatcgctcatctggcccgcctgggtctgaatgaagacgacctgccccgtaccaccgagaccctgaacaacatcctcggcctgatcgaccgcatgcaggccgtcgacacaaccggcatcgaacccctggcccatccgctggaaacccaccagcggctgcgcgccgataccgtcaccgaaagcaatcagcgcgaggcctaccaggccatcgccccggccgtggaagacggcctgtatctggttccacgggtgatcgagtaatgaaggacgtcgacatgcaccaactgaccctcgccgagatcgcccgcgcgctgaccgacaagcagttctccgccgaagagctgacgcgctcgctactggaccgcatcgggcagctcgatcctcagctgaacagtttcatcaccgtcaccgaagagcaggccatcgctcaggcccaggccgccgacgcacgccgcgccaacggcgagagcggcgccttgctgggtgcgccgatcggccacaaggacctgttctgcactcaaggcatccgtaccagctgcggctcgaagatgctcgacaacttccaggcgccctacgacgccaccgtggtcgagcgcctggccgcagcgggagccgtatcgctgggcaagctgaacatggacgaattcgccatgggctcggccaatgagtcgagccactacggcgcggtgaagaacccctgggatctgaaccgggtgccggggggatcctccggtggctcggccgcagccgtggcggcgcgactgttgcctgccgcgaccggcagcgacaccggcggctcgatccgccagccggcggcactgaccaacctcaccggcctcaagcccacctacggccgcgtatcgcgctggggcatgatcgcctacgcctccagcctcgatcagggcggtccgctggcccgtacggccgaagactgcgccttgatgctcggcgccatggccggcttcgatccgaaggactccaccagcgtcgaccagccactggacgactacctcgccgcgctgagcaagccgctgaccggcctgcgcatcggcctgccgaaggaatatttcggcgcaggcctggacgccaagatcgccgatgcggtgatggcgaccgttgacacgctgaagaaactcggcgccacggtgaaggacatcagcctgccgaacatgcagcacgcgatcccgtcttactatgtgatcgcgccggccgaggcctcctccaacctctcgcgtttcgatggcgtgcggttcggctatcgctgcgagagcccggtcgacctgaccgatctctacaagcgctcgcgcgccgaaggcttcggtgacgaagtccgccggcgcatcatggtcgggacatacgcactctccgcgggttattacgacgcctattacctgaaggctcagaagatccgccgcctgatcaagaacgatttcgtcagcgccttcgaggaagtcgacgtgatcctcggcccgaccacgccgaacctcgcctggaagctcggcgaaaaaaatgccgacccggtctcggcctatctcgaagacatctacaccatcacggccaacctcgcgggcattcccggcctgtccatgccggccggcttcatcgacggcttgccggtgggcgtacagctgctggccccctacttccaggaaagccgcctgctcaacgtcgcgcaccagtaccagcaggtcaccgactggcataaacaagcaccgagcggcttctgaggagattgatgatgcaatgggaaaccgtaatcgggcttgagattcacgcccagctcgccactcagtcgaagattttctccggcagcgccaccaccttcggcgccgagcccaacacccaggccagtctggtcgacctcggcatgcccggcaccctgccggttctgaacgccgaggccgtgcgcatggcctgcaagttcggcctggccatcgacgccgagatcgccgaaaagaacgtcttcgcgcgcaagaactacttttacccggacctgcccaagggctatcagaccagccagatggatcaccccatcgtcggcaagggccatctggatatcaccctggaagacggcagcacccgccgcatcggcatcacccgcgcgcacctggaagaagatgccggcaagagcctgcacgaagatttccacggcatgagtggcatcgacctcaatcgcgccggcacgccgctgctggagatcgtctccgagccggatatccgctcggccaaggaagcggtcgcctacgtcaaggcgatccatgcgctggtgcgctacctgggcatctgcgacggcaacatggccgaaggctcgctgcgctgcgactgcaacgtctcggtgcggccgaaaggccaggccgagttcggcacccgcgccgagatcaagaacgtcaactccttccgcttcatcgaaaaggcgatcaaccacgaagtccagcgacagatcgagctgatcgaggacggcggcaaggtagtgcaggaaacccgcctgtacgacccgaacaaggacgagacgcgctccatgcgcagcaaggaagaagccaacgactaccgctacttcccctgccccgacctgttgccggtggtgatcgagcagagctttctcgacgagatacgtgccagcctgccagagctgccggtgcagaagcgcgaccgtttcgagcgcgagttcggcctgtccgcctacgacgccgatgtcctggccgcaagccgcgagatggctgactacttcgaagcggtgcaacaggtttgcggtgacgccaaactggcggccaactgggtgatgggcgagctctccagcctgctcaacaaggacggactggacatcgaacaatcgccggtatcggccgagcagctgggcggcatgatccaacgcatcaaggacaacaccatcagcggcaagatcgccaagatggtcttcgaggcgatggccgccggtgaaggatcggccgacgagatcatcgagaagaagggcctcaagcaggttaccgactccggtgcgatcgagaaaatgctggacgaggtgctggccgccaacgccgagcaggtcgagcagtaccgcgcctctgatgaggccaagcgcggcaagatgttcggcttcttcgtcggccaggcgatgaaggcctcgaagggcaaggccaaccctggccaggtcaaccagctgcttaaaagcaagctcgaaggctgatcgacaaggcgggccgccaggtccgcctcgctcccccgctcctgctcgacgacgttgaacggctgtcgctgttgatgctcaaaagccttcgaggcccgataaccgatcactggccgccatcggatcgatcccgttcgggaaggattggcgtatgcgaaccagactgctgctcattgcactgcccttcgccctgttcggcggatgtggcgatacccaggaagcgtattcgaaggccagaaacagctttacccagcaaggcgtggcgtcctattacgctcgcagctttcatggcgaagaaaccgccagtggcgagaccttcaaccagaacaaactggtcgccgcgcacaaaacgctgccattcggtacgcgggtgaaggtgaccaacctcgataacggcaggcaggtcactgtgcgtatcgtcgaccgcgggccgttcacacggggacggatcatcgacctgtcgcgagtcgccgccgctaggctcgacctgctcgaagacggcatcgccagggtgaagatcgaaaagctggatcgatagatccacacccgtccaccaccggagttccgatggacctgttgacaatcgcctacctgatcggcgggctggtattgctggtgctaggcgccgaggcgctggtacggggcgccgcgaaactggctgctcgtttcggcatatcaccactcatcatcggcctgacggtcgtcgcattcggcaccagtgcaccggaaacggcggtcagcatccaggcgtcgctgaacggcagcggggacattgccgtgggcaacgtgatcggaagcaacatcgccaacatcttgctgatcctaggcctgtccgcgctcgtggcgccgctgctggtgtcgcgccagctcgtgcgcctcgacgtaccggtgatgatcggtgcgggcgtcctgacctacatgctcgcctggaacggcagcattagtcgcctggacggcgccattctgctggcctcgctgctgctttacacgtggttcctggtcatcgccagcaagcgcgaaaaaagccgggcagctgtggacgagttcgccatcgaattcggtgccgacgaccaagcgaggccgtggagctgggtactgcagctgctgttgatcctgctcgggctgggcctgttgatggtcggctcgcaactgctgatcgagggggcggtggctctggctcgcgccttggggctgtcggagctggtgatcggcctgaccgtgatcgcggtagggacctcgatgcccgagctggcgacctcgctgatggcggtgtaccgcggcgagcgcgacatcgcggtcggcaacatcgttggcagttgcatcttcaacctgttgctggtgctgggtgccggcgcgctggtttcagccgacggtctgtccatctcgcccaatgcgctggcgttcgaccttccggtgatgctcgcggtattcgccgcctgcctgcctatcttcttctccggctaccgcatcaaccgctgggaaggcgtagtgttcttcggttattacctggcctacacgctttacctggtgctgttttccaccggcctgccggcgatcaacctgctgcgccacgcaatgacttggtacgtattgcccttgaccgccatcacgcttttggtgatctttctgcgcgcctggaagcaccagcgctgaaccatttccttccctggagcgactctacgtgtccgcaatgacgttcgtctatttgatagccggcctggtacttcttgtcgccggcgccgaagtgctggtgcgtggcgcggccaagcttgcggcgcagttcggtatcccgcccctggtgatcggactcacggtggtggcgttcggcaccagtgcgccggaaaccgcggtgagcgtgcaggcagcgctcaatggcagtggcgacatcgccattggcaacgtgctgggaagcaatatcgccaacgtactgttgatcctcggaatgacgtccttggttgcgccgctgatcgtctctcgccagctgattcggctcgacgtacccatcatgatcggcgccagcctggtcacctacgccctggcttgggacggcgcgctcagccggctcgatggcgcactgctgttttgcgcggtgatcggctacacggcgttcctgatcgtcagcagccgtcgcgccaatgcgaacgcaactgaagacgacgagttcgccaaggagttcggcctcgacgcagcgcccaagccctacgccagcctgatcaatgctggcctggtcatcgccggcttggcgctgctggtcggtggttcccattttctggtggagggcgccgtatcgcttgcccgggcgctgggcctgtccgaactggtgatcgggctgaccgttatcgccgtcggcacctcgctcccggaactcgccacctcgatcctcgcagccattcgcggcgagcgtgacatcgccgtaggcaatatcgtcggcagcaacatctttaatctgctctgcgtgctgggactggcctcgctggtgtctccgagcgcgatcggggtggcggcgaacgcactggctttcgatttcccggtcatgatcgcggttgcagtggcttgcctgcctatcttcttcaccggctactgcatcaaccgctgggagggcctgctgttcctggcctactacgtcgcctacacggtctatctggtaatggtcagcaccggacgcgctttcgccgaaaccttcggcgacgcgctgatcggttatgccgtaccactgaccgccatcaccctgctggtgatcgccactcgcgcctggaagcagcagccacgatagtgcggctcagacaacaccagcggaccaggcctgccagttggcgcaggccgacgccgtcattcaaccttcgcggctgtgcaggcgcggcagctcaacgacctggccgatctcttcgtcgtccagccgactgagcgtgccgtcaaccaccgcaccgttctccatgctcagctgacggtaacggatattgccgcgcacccgcgcgttggaatgcagttccagcaggtgctcgacgaccaagtcgccgaccaccgtgccatcgatcagcgcgtcatagctgctgacattgccttcgatccgcccctcggtgcttaacgccagcagactgtgcgttcccggcttgtggtagacgttgcccgtcaccgcaccgctaatcttcaacccttcctcgaacgccatgtcgcccgtcagcgaaacattgctggagaccagactcgaaaactgatcgatggtgacgcttacggaattcttcttgccgaacatcaactcactccaacgtgtttaacgggctttcttctgctgtttgaacttctgctgtttgaaaaaggccaggtccgtctgcaaccgttcgacctgggccgacaggacggcaatgcgccccagcaactgctcctgcgtcgcctcggcttcccgatgctgcagccggccctgctcgagtgcgtccagcaatgatcgattctcggctgccagcgccgtgagccgatcctcgtgaacggccgagtcttccagccgcaaaatcaccagagccgcgttcaggccaagcagagcaacgatcatccagagccagggccgcgagcgacgagccatccgcagttggtgctcggcccgcagcagttggcgcgtatcgggcttagtcgtcagcctgaacatcgccgactcgttccagttcacccagggcgaggaagcgctgcgggtcgacgaagcgccctttatgcaacacctcgaaatgtagatgcggtccggttgagcgcccggtcgagcccacagcgccgatccgctgctcaggggtcacaacctcccccacccgcacatcgatcctggacaggtgggcgtagcgcgtcatcagtcggttgccgtgatcgagcacaaccagctgaccatagccgccgcgggtaccggcgaaacgaacccgcccgccggcagccgcgcgaacgtccgagccgctgcgcagggaaaaatccacgccggaatgaaacgccgcctgttttcggaacggatcgattcggttaccgaatgccgagccgaggcgtgcttcgccgaccggtcgccgcgacggtatcgccatcagcgccgcgttgcgctcggcaacgcgctgcatcatgccgtccagcaccgcacgcatgcagctcgccgaagcctcgctgcgggcaagatcctccaaccccaggccatcgccctgcaacggctccatctcagggcagccccgcggcggcagcaggataccgccctgccctgcgccgtcttcaggtcgcggtggcaccagcaccggtagcaggctggggtcgagtgcggagagctgtgcgttgagcatgcgttgctcgcccaacatctgctgcagtgcgagcacatcggactcaagcgatttcaaacggccaaccaccttgccgacccgcgcaatcgcaaagcgctcttcgctatcgatgtccggctccgtcacatcggcggacgagtacgcggcggtaccgcggtcctgcccaagccagaagccaccggcaaaagtgccgaggttcagaagcagaagcaacgccaggcctgaaccgactttacgagacggactgacgacacgactggcatcccgggtcagtgaacggctcgaaggtgtgaataacggcatcggtactcccggaaaaaacaagctggctcgccgaggcgggccagccatcgaacatccgggcgcaatgtgaaggatccaaggttttttttctgcggcctgctgaacgatgcggccacctcgccacgaccatatgtcggaaaaccgatgacggtcacaacccggctggcaacgtctagatccagcccagccaaccgagcacgaacaatccgaagttgatgctgatcacggccatcagggtggtgagcacgatgattgtcgccgccagctgatggttggcattggtcgcccgtgccatcacgaaactggccgatgccgtcgggcaggcgaaatagaggaaaagaataccgagctcggcaccgcggaatccgaacagccaggccccgatggtggccaacgccggcagccagaccagcttcatcagactcgagctcagcgcaatgcggctgctttcacgcaggaccgagagcgacagcgtgccgccgatgcagataagcgccagcggtagcgtcatctgcgcgaaatactgcccggatgtcagcagccagtccggcaacggaacctgccaataggcaaaggggacggcggccgtcacgccaatgatcagcgggttacgcacgatgctgagcaggatggcagcggcgctggcgcgtccttccgggttgtagatcgccagaatcagcgccgacaggctgttgtagacgagtatcacgaggccagccagcactccgcccagcgacaacccgtagtcaccgtagagactcgtggcgagcgccagcccgacaatgccgttgttgccgcgaaacgcgccctggacgtagacgccgcggtctgcacgcgggcaacgccagagcgcccacgcccaggcgaggaagaaggtcgttacggtggcgacgacgtaatagctcagcaatgccggctgcagcgccgcatccaggtcggccctgaggatcgacaggaacagcagggtcggcatcgtggccttgaacacgagcgatgaagcggtgtggatgaaggatgcgtcgatccaggccaaccgtttgagcgcgacaccgatgaacaacatgacgaagaccggagcggtgacgcccagggtctggatggcaacggaaagcatgaacgagctctggaagcgaagttcgccctatgttaaccgtagatccgtgggaacgggctcgaccgcgaaaaggggcggcatcgcagtagagttcgcggtcaagaccgctccgacaagagccgggccgaccccgcagaattgcccgccagccggaaggccgttgcctgctgaatcccggcggcccgatggccaggacattccagccaagaacggttcagcgccgtaccgggcgcttctgcagtttgcgttgcaaggtccgccggtgcatgcctagcgcgcgggccgtggcggagatattgccgtcgtgctcgccgagaacacgctgaatgtgctcccactggagccggtccaccgacatcgggttttccggtaccagggtgtccaggtcggcatgtttggacagcagcgcggcgagcacgtcgtcggcatcggcaggcttgcacaggtagttgcaggccccgcgcttgatggcctcgacggcggtggcgatgcttgaatagccggtcaggatcagcaccttcatttccggatcgagctcgagcagcttgggcagcagaaccaggccggagtcgccgtccattttcaggtccagcaccgcgtagtcgggcagctcctgcttcgccatctccaggccttcttcggccgagccggcaatactgacgtgcagaccacgccggctcatggcgcgcgccatgacccgggtaaacgtggggtcgtcatctaccagcaacaggtggggctgctcttcgccttcgtgctgcaactcttcggtcatgtctagattcctcgcgtttgggtcacgtcaggttcaggcccgcatcgaaccatgcggcaggcgcagttcggtcagggtgccaccctcttcgtgattgtaaagcttcaccgttccgcccgcgcgggtcacgctggcctggctcagaaacaggccgaggccgaaccccttgcccttggtggtgatgaagggcctgccgatctgctcggcgatggccagcggcactccggcgccgtggtcgcggatggtcagtctgatccactgcgcgtcccagtccaggcgaatatccagattgtccgggttggcatcggtggcgttgttcagcaggttgagcagcgattgcccgaggtcggcaggcggcatcaggcgcggcggggagcccttgcccaggcactggaagcgataggtcgcctccgggcgcatcagatgccagcgctgcagcaccgattcgacccactcgcgcacggtctgctcgacgacagcctgacgacgatcggcctcggcggcgcgtaccagctggcgcaagctttccttgcacagctgcacctgcgactgcagcagggccaggtcatcgttcaactcaggctgcggatactcctggcgcagctccttgagcagcacgctcatggtggccaagggtgtgcccagctcgtgcgcggcgcctgcggcctgggtagccaccgccagcaattgctgatcgcgcatgctctcctcgcggcgctgggcctggagctgttcctgacgtcgcaactgctcggccatgcgcgccacgaaaaaggtgatcaacgccgccgccagggcgaagctcagccacatcccgtaaaccagcaaggtggtgcgatcgaccggcggcacgatcaccgggtcataccacaccagcatcagggtgtagccagccagggcaagaccggacaacacgaccgaatacaaccaaggcagcgtcgccgcagcgatggtcaacggcaccaggtaataggaaacgaacgggttggtcgagccgcccgagtagtacagcaaggcactgtggatcagcaggtcggtggccaggtgcacggcatactcgagttcggtcaccggccacgggccgcgcagacgcaatgccgtacccaggcaaatcattgccgacacggccagggtcacgccgagatgaaaccatggcagcccgaacagttgcgtggcgtaggcaagccctaccgcacccgcctgagcagcgagcacgagaatgcggatcaggatgagcaggcggaggttttggcggctggcggacagcagatgaacggatgcgtacatggggtctccaaagagccgcgagtataaccaagccgcccgaatgtcagctgatctgcggcaacgcgacgcacgaaaaactgcatatcgccaggcaaagggctaaagtctttgcgccgcaccgctggtgctatcgaatccaggagttttcatgttcgtgaccctacctcgcagcgttgcgctgctcgcctgtatcgcctgccttcccgctgtcgccgacgagcagcactacaaccagatctcgctacgcgccgaagcgaccagcgaggtcgcccaggaccgcatgcatgtcacgctctacagcgaagcgcagcacgaagatccggcgcaactggccgcagagaccactcggaccatgaacaaggcgcttgaacgcgcccggcaagcgaaaggcgtggtggtcagtcagggtagccgaagcagctatccggtctacgaagagaaaggccagcagatcaccgcctggcgcgagcgtgccgagctgcggctggaaagcggcgatttcgccacgctgtccaagctgaccggcgagctgatgcaagacctgaaaatgggcagcatgcagttcagcgtttccgatgcgatccgcaagcagaacgaagacgcactgctcaaggatgcggtcgccgccttccgcgcccgcgcgcaactggccaccgaggccttgggcggcagcgattaccgaatcgtcagcctcaacctgtcgagcggtggcggctaccagccggaaatgcgcaacttcgcgatgaagagcatggacgccgcgcccacaccggacatcgaggccggcacccgccagatcagcatcaacgccgacggcgtgatcgaggtgcagatgccctgatcgaccgcgccgagcggaaaaggctcgccgtcccgcctcggccgctcgacgtggcattgtccggtcaagtctcgatgcatttaggccgataggtgccatgtgcgtatggagaggatggcctgaaccgggtgtgagccgctttagctgcgcaaaaacaaacgccccgataaacatcggggcgttttctagtttgccgccgcctctacagaccggttttcacacagcctgaacttcgcggcgtttgcacagccggctcgaacgcttcgcggtcaagaccgctcccacggttgcatggtgcatgtaggagcgggtctcgaccgcgagctgttcggtatacgggcgcatctcacttcggagagagcggcaaggctcagatgtagtaggccttcagcggcgggaagccgttgaattccaccgcgctgtagctggtggtgtaagcgccagtggagaaccagtacaagcggtcaccgctcgccagattcagcggcaggccgtacttgtagtgctcgtacatgatgtcggcgctgtcgcatgtcgggccagcgatgacgacttcttccatttcgcccttcttttcggtccagatcggaaacttgatggactcgtccatggtttcgatcagcccgctgaacttgcccacgtcggtgaacacccagcgctcgaccgcggtgcgcgacttgcgcgataccagcaccacttcggagaccagcacgccggcgttggcgatcagcgagcggcccggctcgaggatgatctcgggcaggtcatcgccgaagtcgtccttcaggaagcggatgatttcgtcggcgtaggtggtcagatcgttggtcttggcgatgtagttcgccgggaagccgccgcccatgttgatcatctgcaggacaatgccgtcctcttccttcagacgctcgaagatcaccttgaccttggcgatggcggcgtcccagacgtcgatgtcgcgctgctgcgagccgacatggaaggacacgccgtacggcaccaggcccagctgcttggccaggatcagcagatccagcgccatgtcggtctggcagccgaacttgcgcgacagcggccagtcggcggtgttggagccttcggtgaggatccgcacatagactttcgagcccggcgcggccttggcgatgttgcgcaggtcggcttccgagtcggtggcgtacatgcgcacgcccttgtcgtagaagtagcggatgtccttggctttcttgatggtgttgccgtagctgatgcgctccgggccgacgccggtggccatgaccttgtccagctcgtagatcgaggcgatgtcgaagttcgagcccttgtcgcgcagcagttcggttatctcggtggccgggttggccttcaccgcgtagtagatcttggcgaacggaaagttgctgaccagctggtcgtacgaatcactgatgattttcgtatcgatgacgacgaacggggtttcgcgttcatcggcgaaggccttcatcttctggaaggtttcgcgcggatagtagtcttcgatcttgatcgacatgcagggctccagttggcggaacggaagagtgagcagggggtggcgcaaggcctcgaacgtctgacagtttccccattttggttcgcctacttcccaaggcatgtcgccgagcatcaccggtcccggtgaacctgcgagctgcgctcgtcggattcgaaaaaccggcaacctctcgtcgtcagtacttgagccggatggatcgtttccagcatggacgttcgggcgcgaactttagaaccacagctgttcgagatcaacgaaaaatccgtactcactccctttttcgaacggtcttggcaaacctaccgcattcaaaccgaccgatatgacgcggggatgttccgatcgcatcggcccgccacgcttattcagcgtaacggcatggcgcaaaaatgccaccggcgaccaccgagcaaccggccgtgacgatggcaacggccaatatcgcggcggctttgctgctataatcgccggctttttccgacacgctttcataccgggaccgccatgacctctcaggccgccgaagtcgcgaagcgccgcaccttcgccatcatttcccaccccgacgcgggcaagaccaccatcaccgaaaagctcctgctgatgggcaaggcgattgccgtggccggtaccgtcaagtcgcgtaaatccgaccgtcatgcgacctccgactggatggaaatggaaaagcagcgcggcatctccatcaccacctcggtaatgcagttcccctaccgcgagcacatgatcaacctgctcgacacccccggccacgaagacttctcggaagacacctaccgcaccctgaccgcggtggactcggcgctgatggtcctcgacggcggtaagggcgtcgagccgcgcaccatcgcgctgatggacgtctgccgtctgcgcgacacgcccatcgtcagcttcatcaacaagctcgaccgcgacatccgcgaccccatcgagctgctcgacgagatcgaggcggtactgaagatcaaggccgcgcccatcacctggccgatcggctgctaccgcgacttcaagggcgtgtaccacctcaaggacgactacatcatcgtctacacgccgggccacgggcacgagcgcaccgaggtcaagatcatcgagaagctcgattccgacgaagcgcgcaagcacatcggcgacgagtacgagcgcttcctcgaacagctcgaactggtccagggcgcctgccacgagttcgaccaggacgagttcctcagcggtcagctgaccccggtgttcttcggcaccgcgctgggcaacttcggggtcgatcatgtgctcgatgcggtcgtcgactgggcgccgcgcccgctgcctcgcgctgccaacgagcgcatcgtcgagccggtcgaggacaagttcaccggcttcgtgttcaagatccaggcgaacatggaccccaagcaccgcgaccgcatcgccttcatgcgcatctgttcgggcaagtacgagaaaggcatgaagctgcgccacgcccgcatcggcaaagacatccgcatcgccgacgccctgaccttcttctccagcgaacgtgagcaactggaagaagcctgggccggcgacatcatcggcctgcacaaccacggcaccatccaaatcggcgacaccttcaccgaaggcgaaaacctcggcttcaccggcatcccgcacttcgccccggaactgttccgccgtgtgcgcctgaaggacccgctgaaatccaagcagctgcgccagggcctgcaggaactggccgaagaaggcgccacccaggtgttcttccccgagcgtaacaacgacatcatcctcggcgcggtcggcgtgctgcagttcgacgtcgtcgccagccggctgaaggaggaatacaaggttgagtgcgcctacgaggcgatcaacgtctggtcggcgcgctggatcgagtgcgacaacgagaagaagctcaaggaattctccgacaaggcgtacgaaaacctggcgctcgacggtggtggccacctcacctacctggcgccgacccgggtcaacctgagcctgatggaagagcgctggccggaggtgaagttcagcgcaacgcgcgagcatcattgaggcctgcaacacgggccggcggaaggcgttaggctatcttcgcggtttcacatccgggagctacatgatgcggcgtcttctgcttgcgcttgtgctgttcacctctgctgctgaggccggggtgctgatcaacagtccttactgggtcgttgcactgacctgctcgaacaatcaggagtgctatgccgcgagtaacggcagctacaccggttcattgaacggcgcacgacgcttcgacgatcagacccaggcgacgaagtttctggacagcctgacgtccagcctgcgggacaaatcgccacgcctggagcagcattcggagcagcaatgcgtggagcccagcggcaaccgccccgctcagggaacacgctgctgaaaaggcttgagccaggctcttttacaaggatcgtgaaatgccaaacgaacgagcatcgcccgggcaacgcctgttcgcccaacaactgcgcacgcagctcaccgactgcgaacgcctgctctggcgacagctacgcaatcgaggcctggcggggctgaagtttcgtcgacaacatccctgcccgccgtatgtgctggacttctactgtgccgaactgcatctggcaatcgaactcgacggcggccaacactatgacgaggccggactggcgaaggatcgcgtgcgcaccgcctacctgaggcgccagggcctcgaggtgctgcgcttcagcaacctggatgtgctgcagacatggatggcgttctggcggaggtcatgcgctgggtagaagtccgctcccctcaccccagccctctccccggaggggagagggggcaggattgagcgcgccggagggtcatcggttgtccccaacggggtaaggtaggcctgcacgtcagcagcaccaacacatacggcatcaagctgactcaccacctttcggcgtgcaaagaccaatcccctcgcccctttggggagagggctagggtgagggggcgtggtatcgcctgacatcgacgccaccatccccacccattccaactagaaggttcggttgagcgcgtcggacccgcgtgtttgttcaacgcaccagtgacctgatgagctgaagaatctcgacggtgttctgacagagctctcgcgctggcccgaagcccgccccctcaccccaaccctctccccagcggggagagggagccggaccgagcgcgctggatcatcgccgtcatccgaacctcgggttttggctgaacgcgccgacggtcgcggttattcgcaacctggcgatttagctgaacacgccggacggtcgggattatccgaaatgagttcaggcgggctgtgcgtcagccagcatcagcgcatacggcatcaagctgatcaccacctttcggcgtgcacaaaacaagtcccctcgcccctctggggagagggctagggtgagggggcgtggtatcgcctgacatcgacgccaccctccccacccattccaactagaaggttcggttgagcgcgtcggacccgcgtgtttgttcgacgcaccagtgacctgatgagctgaagaatctcgacggtgttctgacagagctctcgcgctggcccgaagcccgccccctcaccccaaccctctccccagcggggagagggagccggaccgagcccgccggatcattgccgttatccgaacctcgggttttggctgaacgcgccgacggtcgcggttatgcgcaacctggcgacttagctgagcgcaccgggggatcatcggttgtcctaatcggggtcaggcgagcctgccaatcagccaacatcaacacatacgacatcaagctgactcatcacctttcggcgtgcacaaaaccagtcccctctcccctttggggagagggctagggtgaggggacggactttctgcggaacatcttcgtcgagccgagcctcaccccaggaactcaccaaaggccttcgcccctattccccttcctcatcaagcgtaaaggccacgaccgaatccccaatcttggtaccgaacgagccatgcccaccggccatctgcacgacgtactgcttgccggtcttctccgatacataagtcatcggtgtcgcctgccccccggcaggcaggcggcctttccacagttgctcgccggtctgcaagtcataggcgcgcaggtagtagtccagcgtgccgctcatgaaggccacgccacccgcggtgacaatcgggccgcccagtgccggcgtgccgaccggaagcgggatggggactggcgcgctgtcgcggctggtgccgttcttgtgcagccagaccttcttcatggtgcgcagatcgaagccggtcacgtaaccccacggcggggtctggcatggcaggcccagcaccgacatgaacggcttgaggctgaccatgtacggcgcgcccaggttgggttgcagcccggtttcgccgccgccggtgcgctcgtccggcgccacttcgctgcgcttgaccatggtcgagacgaaggccagatagttcggcgcgccgaacatgacctgccggctcggatccaccgccaccgagggccagttgaacgtgccgacgttgcccggatagatcaacgaaccaccctcggacggcggagtgaagtcgccttcatagcgcagcttgcggaactggatgcggcacatcatctggtccagcggcgtgccgccccacatgtcgtgctcctgcagcggttcgtccggggcgtagctgaccgacgagacaggctgggtaggagcggtgaattcaccgtagtcggtcccttgtggcaccgggatttcgcccaccggcacgatgggctcgccggtgcggcggtcgaggatgtagaggtcgccgcgcttggtcggttgaatgatggccggcaccttgccctcgggccggtcgatgtccaccagcgtcggctgcgaaggcaggtcgcggtcccagagatcgtgatgcacggtctggaattcccagcggatcttgcccgtctccagatccagcgccaccagggtgtcggtgaagcgctccgtttccggggtacgtggtttcgcccactgatccggtgtctggttgccggtggggatgtagaccagccccagggattcgtcggccaccgaggtggtccaccagttcggcgtgctgcgggtataggtttcgcccggtgccaaaggctcggaggcgtccgggttgcccgggtcgaaataccagaccaggtcgccgctgtgaacgtcgaacgcgcgcacgacgccgccgggagaatccaccgcgccgttatcggtgatcgagccgccgacgatcaccagcttctcggtcacgaccggcggcgacgtcggcaggtagacgcccagcgcaccttcgccgaggccttccttcaggtcgatcacaccggcatcgccgaagtcctcgcaaggcttgccgtcgtcgacatccagggcgaccagcgtcgcatcgttggtgggcaggaacaggcggcgctcacaacgtgcggcgggctggtccggctggtcagtcgacgccgcggcggcatagcgcacaccatcatggaaggccaggcctcggcaggtcatgtgctggtagtactcggccttgcgattgatgttcgggtcgtaacgccagcgctcctcgccggtatcggcatccagtgcgatggcgatgctgtgcggggtgcagatgaacaggctattgccgaccttgagcggcgtcacctcgtaggtgaattcgcccggatcggtcggtccgggcaggtcgcccgtgtggtattcccaggctttcttgagcttgtcgacgttgcgcggggtgatcaggtcggcggtggaatagcggtcgccatgctcggatccgccatacgccggccattcgctggtcgtgcgccctgcctgcccctgcgggttcaggccctgcatctgcgcatcgctgaactcgcctttgatcgagtgatagtcctgcgtcaacgaaaacaccgccatcagcgcgccggccaccaggccgatgccgagcaggccgctggcgccgtcacgccagaccagccggtcgctgacgtagcggttgacgaaaggcaggatcagccagaggccgaggatgcaccacagatcgattcgtggcgccagttgccaccagtcgaagcgaacctcgtagatcgtccaggccaacgtcgccagtaacagcaccgcatacagccaaatcgccgcgcggtgtcgggcgaacagcagcccggcgaccaccagcaagccaatgcccgcgatcaggtaataccatgacccgcccagcgcggcgaggtaaccgccgccgagcgccatcagcgcgcccagcaccagcaccaccaaggcggtcagcgtaatccgtaaaggacgggggccgtattcgatactcatcacaatctccagccggttcgtttctctgaaacaagagcgggtggacgtcgtgcgatcttcacccgctatctgtggatgcgacaggcacgccttagttcagcctttcggcctcgcgtcaggccgtggcgccgactgccagaggctgtgcctcgggccttttgatcaccgcatagatcactccggtcaccaggctgccggccaggatcgcgaccagatacagcagcgcatggttgatggcgttggggatcagcagcacgaacagcccgccatgaggcgccagcagcttggcgccgaacgccatggacaaggcgccggtcagcgcgccgccggcaatgctcgccggaatcacccgcagcgggtctttcgcagcgaagggaatcgcgccttcggagataaaacagcagcccagcaccaatgccgccttgccggcttcgcgctcggtctgggcgaatttgcgtcgggcaatcagcgtggcgatacccatgccgatgggcggcaccatgcctgcggccatggtcgcggccatcggcgcgtagctttgcgaggcgagcagcccgaccgaaaacgcataggccgccttgttaaccggcccgcccaggtcgacgcacatcatgctgccgagcagcagcccgagcaggatggcgttggaggtgcccatggtgtcgaggaactcggtgagcccggtgagcatcttcgccaccggcgcgccgaccacgtagatcattaccagcccggtgaacagactcgccagcagcgggatgatcaggatcggcttcagcgattcgatactggccggcagaggaatccagcggctgactgccttggccgcatagccggcgacgaaaccggcgatgatgccgccgatgaagcccgcgccgagcgtgcccgccagcaagccgccgatcatgccgggcgcaaggcccgggcgatcggcgatggaataggcgatgtagccggccagcagcggcaccatcagtttgaaggccgtatcgccgccgatctgcatcagcgccgcggccagcgtgccctcctccttgaaggcctcgatgccgaagacgaacgacagcgcgatcatcaggccgcccgcgacgaccatcggcagcatgtaggaaaccccggtcagcaggtgcttgtagacgccggtcttctcgcccttctgctcgcccgctccggcattggccgcagcgccaccgctgagcaccgcgccttcttcgagcgcacgatccagcgtcgcctccggttgtttcagcgccacaccggtgccgcagcggaagacgcgcttgccggcgaagcgggcgacgtccacttcgatatcggcggcgagcagcacgacatccgcctcttcgatggcctggggctcgagcacgttgcgcgcgcccaccgagccgcgggtttcgacttgcaggtcataacccttgcgtacggcggcctgctgcagggcctcggcggccatgaaggtatgcgcaacgccggtcgggcaggcagtgatcgccaccagcttgggcttgccgctggccggcgcggcgtcggcctcatcgctctgttgcagttcggtcgccgtctcggcagcgctgcgcaggaagccctcgggatcgagcagcgcttcggagggcgtcgactgcaccacgcgtttgccgacgaagcgttgcagcggcagcggcccggtcttcaccacgacgaccagatcggcgttggcgatctgcgccggcgtcagcggcgagccgatggccttggggtcgtggacttccacggcggtcgaccagccaagacgctgggcagccgcttcgagcaggcgtgacgtcagcacgctggtgaccattccgttggggcaggccgtgacgatgagaagattcattccttcacctcttattcgaattattggctgagcggctggagccggatcgcggcttccaactcggcgagctgggccgtatcggtgatgccaaagccgacctgcccgaccgcctgcgccgcgatggcggtggcgtgtgtgagggtgcgttcggccggccagccttccagcaaaccgtgaagcatgccggcgagcagcgagtcaccggcgccgacggtgctgacgacccgaaccttcggcggattggcatgcagggccgcgtttggcgaaaaccagctgacgccgtgggcaccctgtgaaaccaccacatgcgcgatgccttcggcttgcaggcgccgtgcttcggccgcgaccgccgacgaatcgtcgagcgcgacgccccgcgcctcgcccagctcttcttcgttgggtttgatcagccagggcgtggcggccaggccttcgcgcagcgctgcgccgctggtatccagtgacacgcgggcacccaggcgcttgagccgttgcagaagctcgacgaaccactgcacctcgataccacgcggcaggctgccggccacgatgacgaggtcatgatcgggcaccagccgttcgagccgcgccagcagctcgtcgcactgcgcctcgctcaccgcgagccccggaccgttgatatcggtgacccgcccatccgcctcggccagcttgaggttgctgcgcgtgtcccccgccacccggacgaactcgtcggcaaaaccacgcgcggcgaacagttgttcgaaggcctgcggattgccctcgccgagaaagccggtgacggtcagctggtggccaaggtcggccagcacctgggcgacgttgaggcccttgccggcggcgtgcacctgcaggctgtcgctgcgattgacctcgcccaggcgcagcgacggcaggcgcacggtcaggtccagcgccgggttgagggtgacggtaaggacacgggccatcagcagtgctccccgacaaaggcgcgcacttcatgggcgccggggagcatcaatgcctgttgcgccaagcgctggcaggcgacgaaatcaagttcgcgcacccgcgccttgaccaacgcgatgctgcgcgccgagacgctcaactcgtccactcccagccccaccagcatcggcaccgccagcgcatcggcggccagttcgccgcagacaccgacccacttgccatgggcgtgcgccgcctcgaccgtcatgccgatcaaacgcagcaccgccgggtgaaggccatcggcctggccggacagactcgggtggccgcggtcgatggccagggtgtactgggtcaggtcgttggtgccaatgctgaagaagtcgacttcctgcgccagcaccggcgcgatcagcgcggcggatggaacctcgatcatgatgccgacctgcagatccgccactggcagctcgacgcgcaggcgatcgaccatcgctttggcggtgcgccattcctcgatgttgccgaccatgggaaacatgatccgcagcggccggccgtcggccgaggcgagcaaggcgcgcagttgggtttcgagaatgtccgggcgttgcaggctcaggcgaatgccgcgcacgccgaggaaggggttttcctcggcgggcattggccagtagggcagcggtttgtcgccgccgacgtctagcgtgcgtaccaccagcggacggccttcgagggcctccagcacgcggcgatactcggcctcctgggttgcctgatccggtgcctgggaatggttcatgaacaccagttcggtgcgcagcaggccgataccctcggcgcccatcgccacggcatccggcgtctcgccggctgcgccgatattggcggcaatttccaccggatggccgtcgcgggtgacagccggctccagccgacgctcatttgcgagccgcttgcgctcttcgcgggcggcgcgttcgctgcgtgcctcctccaactgcgcgtcggtcggtgaaaccagcagctcgccgcgttcgccgtcgagcagcagcagggtgttgggcgccaacccgagcacacccggcccggcaccgacgatcgccggaatgcctagcgcccgcgcgatgatcgcgctgtgcgacgtggcgccgccgcccgccgtgagaatgccggcaacgcgctgggcgttgagcgtggctacatccgaaggcgccacctcttccatcacaaggatgtaaggctggtccggcgcctgctcggcctcgaccccggtcagacaggccagcacgcggcgcccgacatcgcgcaggtccgcggcgcgctcggccagcagcttgtcgtgcagcgcttcctgttgttgcgccgcgctttcgatttcgtccatccaggccgcttcggcgctcaaacccttttgcagccgaacctgcacttcctcgcgcagcgccgggtccttgagcatcgcctggtgggtagtgaaaatgtcgcggatgctggcgacctggctttcggcgatcagcacgccgatctcgccatgcacgcgctctagtgccgcatccagccgctgcagttcgactgtcggcgactcgccgcgtgtcgggtagtcgatcacctgcggtttgcgcaccagcaccgggccaatggcgatgcccggtgacgcggcgatgccgttcacctgttcaccggcgcgcagcgcggcctgctcgatggccgattcagcaggcccctgcgccatgaccggcggctcgctcgcctcgcccggagccggtagcggctcgacctcctcgcccaagccttcctcgaccgctcgcaccagcgccggcagcgcatcgccggcgatcgagggttcggccatgaactccagcacctggccacgctgcgcgcccatcgccagcagcttgctgaggctcttggccgaaacgccggcgctctcgctgccggcctgacgcacgcggatttcaccgtcgaaggactgggcaatttcagtcagcaccttggccgggcgcgcgtgcaaaccatgggcgttggccagcggcacccgagcgctcggccaatcggccggcacctcaccgccgagggcttcgagtaccgtgcgactggacgtcgcctcgctcaattcctgcccgcgcccttcgatcagcaggttgcacagccgctcgagcatggcccggtgcgcttcgccgaggctcgccagtacgaacaggcctttgagcggctgatcatgatgttgaagatcggcagccggcgtgacgaacgccagccctggacgttgcaccgactgctcgctgctcagccaccacaggccatcgcccagcggcagtgcctggttcagcgacaggctggcgttgaaaccaggctccacgcactgcgcgcgcttgagcagcttgacgccctgccacgccagctcgtcgaagtcatcggcggcgacacccagcccgaccagttgtccatccagcgccaacgcctgcggcgcgccttgcagcagatcgatgatcgcctcggggttgtcggctttccgcagcgcctcgctgagatcgccctcgcccagcgctcgggtcaacaactgcagcaacctcaggtgttcatccgaacgcgcggcgatgccaatggcgaggtacacctgctgcccgttgccccaatcgacgccgccggggaaatgcagcaaccgcacgccggtggtgaacacctgatcgcgcgtctccggcgtgccgtgcggaatggctatgccctgcccgagaaacgtcgagccctgcgcttcccgcgcacgcaacccgtcgaggtacccgggcgccaccagcccgtccgccaccaacacctcgctcagcaacgtcagcgcggcaggcttgtccggcgcggtctgatgcatgtgtatgtgctgtgcattcaactcaagcatggaaaactccttgcgggctcgcgcttattgttttgggccggtcgcctcggccgacggggcggtgtcgccgaaatcctgatcgacgcttgagaccggaacactgctgaaacgtttcagctaaggttggcacattacgcaatattgggtaattctagaagcccgagttcataccacccgtcttcgcccggcctgtcttgcagggtacggcgcgccatcgtcaccgcgacgtaacgggaccagaccctaggatctttagttgaaactgactgacattgcccgcctcgccaacgtttcggtgaccaccgccagctatgtgctcaacggcaaggctgcacaacgccggatcagcccggccacggtcgagcgcgtcatggccgtggccgaacagcagggatttcaacttgaccaacaggcagctggcctgcgccgggggcagtcccggacgatcggtttcatcgttccggatctggaaaaccccagctacgcacgcctggccaagctgctcgagcagcgcgcccgccaacgcggctatcagttgctcattgccggctccgacgacgagcccgacaccgagcgccaggtcatccaggtgctacgctcacgccgttgcgacgcgctgatcgtcgccagcagcctgccagccgacgatgccagttaccgaacgttgctggcagccggcaccccggtaatcgccctcgaccgtgcgctggaggccgagcacttctgttccgtggtcagcgacgaccgcgaggcggcggcgcagctgacccgctccctggacgtaccgagcggtgcgcatatcgcgctgatcagtgcgcggcctgcactgccgatcagtcagcagcgggagcaggggtttcaccacgccctcgagcatcaccgcgggccgatcagcgtgctccaggccgagcagttcagccgggcctgcggccgcgaacagatgctcgccctgctcgaccgcgggcccctgcccgatgccttgatcaccaccgcctacgtattgctcgaaggcgtcttcgatgcactgcgtgaacgcgacctgctctggcccggacatctgcgactggcgaccttcggtgacgcgcagttgctggacttcttgccgatccgggtcaacgccatctcccagcagcacgagcagattgccgagcgggtgctggagcgagcgatcgccgccatcgagcaaggcgactatcgccccggggtcatcgccattgcacgcgaattgaaagtgcgccgtccctgagcgatgaacccgtagcgggcatagaatggccgccgacgctgatcgcgagcagactcgccgttacagatgcttgccgcgatccggaaacaatcaatttgcggtcagccataggccgcaccggccccggccttttaacgagcccgccttttctgatgaacattgaacagattattcaacgcctgcatgcgatccgcgaccgcaacgactggcggcgtttccacagcccgaaaaacctcgccatggccgccagcgtggagatggccgagctggtcgagattttccagtggcagaccgaggacgagtcgcgccagctatcggccgaccagctcgaccatgccggccaggaagtcggcgacatcctcatgtacctgctgctgatgtgcagcgaactgggcatcgacatggagcaggcattgctggccaagctcgccgacaacgaaaggcgattcgtccgatgagcgatcgacatttcgacgaactggcgacgcgcttcgccgagaagatctacggcggcgccaagggcgcgatccgtctcgccgtgctgcaggcggatctcaccgaagccttgccgcagcgcccactgcgtgtgctggacatcggtgcggggctcggccacatgagcctctggctcgcacggcagggccatcaggttacgctggccgagcctgccgaacccatgctggagagcgctcgcaagcagttcgccgaggcaggccagaacgcgactttcattcaggccccctggcaggatgtggaaagccacgtcgaaggccgtttcgatctggtcatttgccatgcggtgcttgaatggctggccgaaccgcaggcgatcctgccggtgctgcatcgcttgctcgctgaggacggctggttgtcgctggccttctacaaccgcgatgcgctgatctaccgcaacctgctcaagggccatttcaaaaagctgcgcagcggcacctttgccggtgagcgccagagcctgacaccgcaacaaccgctcgacccgcgcgagctggcggcgcaactcgcaccgcactggcaggtcgaatcaaccagtggcgtgcgcgtattccatgactacatgcccgccgatttccaggcgcgcaccgagcctgccgagctgatcgagatggagctggcctaccgccgccatccgacgtttgccggcctcgggcgctacctgcactggatgtgtcggccccgctgagccgaccgggaggtccaatgtcgttgcgcgctgttctcacgttgctctgcctgagcctggctgcctgccagagcggcaatccgtataccgaggagtcggcgccaatcccgccagctccgccgatcgagcagatccagtctccgatctacccggccgcgccgcgggatttttccagctatcaaagctggagctggcgcaaccagccggccggcactgcctcgatcgctggcgaagagctgcaggaaatggtcgccggcgcccttgaccaacgcgggctgcggccggcccccgccgggaccaagggcgacgtccagatcagcgcgagcgctcggctggagacccgtgttcgccaggtatacgatgactacggaccgcgcgtcggcgtgggtcgctacggcggctatggcccgggctacggcagcggcgtcgggatcggcgccagtgctccggtggtccgcaactatgaagaacaggtgatcacggtgcgcatcgagatgatcgacagcgcctctggccagaccgtctggagcaaccgcgccgcgtcccgcagcggcagcacccaggccgaacgcaaggacgccgcccgcgaagcggtgaatagcgccctggccgactacccgccgcattgacccgcgcctgagcgcgaggaggactacgatgttccgctcattgctgatgctgcccttgctgctggtgctggccgcctgccagggcccccaggtgcaacgggatttcgacccgcaacgggatttttccgcctatcgaacctggagctggcaggagccggccctgcaataccggccggacgatccgcgcatcaaaagcgacctgaccgagcaacgcatccgcagcgcggtaagcgaacagctcgaccagcgcggcttgcgtcaggcccagtccggacagcaaccggatgtacgcgtgcagacttggttcatcgtcgatgaacgtacgcagcaatacaccaccgcatcgatgagcgcctggggcagcccctggtacggctattggggcggcccgatgctcaccgacacccggacgatccattaccaggtcggtaccttgcagatcgatttctacgacgcgaaagacggcaagctggtctggcgtggcagttccgaacggatactgcgcgacgatccgggcagcccacaggaacgcaccggagtgttccgccaggccgtcaccgacgtgctgtcgcaatacccaccgcactgacgcgccgatctgttctttttggtgggaggccgccttatgcaggctgcgcgcttttttttgtgggaggcgcgacccgcggcgaatggggccaactcggtgcccaaagcttcgccccgagggcgggcctcccacaaattgagcccgtgcatggcgctacgtcgtgcaggtcgcgcgcttttctgtgggagccgcgacccgcggcgaacggcgccagctctgtgcccgaacagcttcgccccgagggcggggctcctacaaatgcggtctgtgcataacgccgctctgcatggggcgcgcgctttttgtgggagccgcgacccgcggcgaacgtcgcccgctcggtgcccaaagcttcgccccgagggcgggcctcccacaaattgagcccgagcatggcgctgcgtcgtgcaggtcgcgcgctttttgtgggagccgcgacccgcggcgaatggcgccggctcggcgcccaaagcttcgccccgagggcggggctcccacaaaagcagtccgtgcatggcgtcgatctataccggtcgcatgcttttctgtgggagccgcgactcgcggcgaatggggccaactcggtgcccaaagcttcgccccgagggcgggcctcccaaattgagcccgtgcatggcgctgcgtcgtgcgggtcgcatgcttttctgtgggagccgcgacccgcggcgaatcgcgccggctcggtgcccgaaaagcttcgtcccgagggcgggcctcccacaaattgagcccgtgcatggcgctgcatcgtgcaggccgcgcgcttttctgtgggagccgcgacccgcggcgaatggcgccggctcggagcccaaagcttcgccccgacggcaggcctcgtacacgctagcatccgaataaggtttagcgcgctggatgatcgccgatgaacaaagccaaacaagtagctcgctacccttgtcgcagacgcgccgcgcaccgaaaatggccggccaatcgctgccctgccgttccggctggccagcttctcaaccctggagacaaatcgcatgcccgtcgtcgcctggtggcttctcatcctgccgttcgttgccggcgcctttctgccgcttcaggccggtatcaacgggcaggtcgccaagcacttcggcagtgtgatgagtgccgccatgctgtcgttcgcggtgggcacggtggcgctgatctgcgtggtgttgttccagcgcgacatgccggggctgcaggcgctaaggggtctgaactggtatcactggtgtgccggcctgctgggcatgttcttcatcgccacggccgcctttgccggcccgcgcatcggcgcgctgctgttcatggcgctggtgttggctggccaactgggcatggccttgctgctggaccacttcggctgggcgggctttcgccaatcgtcgataagcctcggcaaggtcgtggggctattgctgattttcggcggcgtttggatgatccgccgcggctaagcacggcggttgagctacttgcgctcgaaggcgtagaacaggttgggctcgctgaccagatagaggtcgccccgcgcgtcgaaggtcatgccttccgcctgaggcacgctcttgtcgaggccagcaaagccactccacaaagagcggaagctgaccagctcgccgcggccatcgagttccagcaacatcttggcttcatcgctgagcagcaccagatggccggtgcgctcgtcgaagtgaaccgaggacaggtcgctggccatgtccttgtcttcgatccacgcctcgcggtcgatgatcttgaggttcaattgcccgtcgaggctggccttgagcccctgaatctcgtacagcttgcgcggtgaatgctccttgaccacgaagagccgatcgccggcacgatcgtagcccaggccctcgaagccggcattctcctcgctacccacaggcagcgacaacgaagcgaagtcaccgcgctgcagcgcaccgggccggctcggcaccggcatgatcaccagggtatgactgcgctcttcggcaaccaccagcaggtcatcgcccagataggtgacggcctccacgtcggtgaacccctcgagcgggtagcgcgccatgaactggccgttcgcgtcgatcgccaccagttcctccgggttgttcaccaccgcccagagatggttgcgccgctcatcgaaggtcagtccggacaggttatcgctgatcgacgccaccggtcgcgcatcgactcgcactcgatactccggcaaccagaggctgcgggcctggcggctgtccgcgtgccaggccgattgcatggcatagaagattcgctcgtccagatggacgttggcggccgcgtagagcagcccggcgacgagcgctcccaggccccacacttgcggacgaagcgcgggcaaccgccacggtatgttggaaagcaatggcatgttcggtactcgtctcgcagcgttggcgagacagactgcttgggaaggattgcatttgcgtgacgcgcaccaccccggcgcgaatcagcccgctaatgacccggccagtcccggctggttcaacgagcgcaccgggaactgccggacggtttggtagcccaatgccgcaggaacggccgcgccagcggtcgcggatcgtccgacaggagcgcagcatgcaggtggaaagctttttcgaatggttgggccaggcgctcggcacggtaattcgttacatcgtcgatgcgctcagtggttttttcggcctgttcgccgatgccggagccaacttcctcgagggattgtcacgaaccctcggcatggaccgctcgctgatcagcctgatcgcgctggcgatcggcctgatgctgctggtcggtgcatttcgtgcctttttccgtcgctcgatcatcgccggggtgatctatctgttcctggggctctggttgttgagctggttgattcattagaagcggcggcaggcggcaggctataggcggcaggcaaagcagagccaaaagctgggcttgagcttgaagcctgcggcctgtagcccgaagcccaaaccgctgctgtatcatgccgggccactctggagcccttcatgtcacggttgatgaccgcttggcagcacgtccccacccacaagcgggtctgggcgctggctgcgccgatgattctgtctaacctctccgtgccactggtggcgctggtggacagcgcggtgatcggccatctaccgcacgcccgtcagctggcggccgtggcggtgggtggcagcctctacacgttactcgtctgggtcatgggctttctgcgcatgggcaccaccggtttcgccgcccaggccgccggacgcgatgacggcggcgcgctgcgccaggtcctgctgcaaggtctgctgctggccctgggcttcgccctgttgctaagcctggtcgcgcttccgctcaaagggtatgcgctgcaattgatgcagccgtcagccgaactcgacgacctcacacagcattacttccacacgcgcctgttcggcctgcccgccgcgctggcgagcctggctctgatcggctggttcctcggcacgcagaacgcccgcgcgcctctggcgattttgctgaccaccaatctcatcaacgtcgttctggatctctggttcgtggtcggcctggactggggcgtggccggcgccgcccgcgcctcggtggtggccgaatggagtggcgtgctggtcggcctggcgctgacccgcggcgcgttgctgcgctacccgggacggctggatcgtcgggcgctagggctctggtccagctggcgaccgctgatgtcagtcaatcgcgatattttcgtgcgctcgctggcgctgcaactggtgttcttcctggtcacggtgcagggcacgcgcctgggtgatgccacggtggcggccaacgcgctgctgctcaacgggctgatgctgaccgcccacgcgctcgatggcctggcgcatgcggtcgaggcgctcagtggccatgcgattggcgcacagaatcgcaccgagctgcgccgaatcctgaccgtcgccggtggctggtcgttgctggcgagcctggcgttcggcctgtttttcctgctcggtggcgagcagttcatcggcttgcagaccgatatcccggcggtacgcgaaactgccatcgcctatctgccgtatcttgcagcgctgccgttggtggccgtctggagctatctgctcgacggcctgttcatcggcgccacccgcgcgcgggaaatgcgcaacgccatgctgctcgccgttgcgatttcgctaccattgggctggctgttgcgcggactgggcaatcatggattgtggttggccttcctcgccttcatgctcctgcgaggcatctgcctgggcagccttgccagaaccctgcaacgtcggcagcagtggttcgtgcccagccatacggtttcggcaggcagcacagccacagccccttgactgaccaaaggaatctgaacaatggcctatgccatcgccgcttacctgcacttcgtggcgatcttcctgctcttcgccctgctggtgctcgagcaccaactgttccgcctgccattgaatttcaagcgcgcccgcagcctgttccgcgtcgacctggccttcggcatcgccgctggcctggtgctgatcaccggcgcggcacgcgcgatgcgctacggcaaagggttggactactacctcaacaacagcttctttcacgccaagatcgggctgttcgtggcggttgcgttgctgtcgatcttccccacggtgaccttcttgcgctggcgccctgcgctcaaggccggtcaggttccgctcatcacaccaaccgcggcgcgctgggtcaaaggcgtgattcgcatcgagctgctcgcgctgctgctgttaccgctgctggcgacgctgatggcgcgcggttttggcgtgaggccactgtagcgggcggcgactgctcggtttcggacacaacccctgccgtcccggctacgtagaccgatcccgccgcccatgcgcccgctcagcagcgtcgttggcgggaagtccgtatcggtggataagaaaagcattatccaccctacgccacctcaacccgctgccgctggccgcggggcggcgcaggcgttatggtcgagcgacattcatcctgggacgaatcatggccgccaaacccagcaatactcgtcagcagatccacctcgccgtcctcatcgatgccgataacgcacctgccgccatcgtcgaggggctgttcgaggaaatcgccaaatacggcgtcgccagcgtcaaacgcatctacggcgactggaccaagcccaatctgggcggctggaagaaggtcctgctggactactcgatccaacccatccaacagttcgcctacacctcgggcaagaacgccaccgacagttcgctgatcatcgacgccatggatttgctctacacccggcggttcgacggcttctgcctggtctccagcgacagcgacttcacccgcctggccgcccgcctgcgcgaggaaggcctgaacgtttacggcttcggcgaacagaagacaccctcgccgttcgtttccgcctgcgacaagttcatctacaccgagattctccgcgccgatgcacccaagacctcccaggagccgccgagcaacggcgagaaggcgtccgcccccacgccaacggagaagaccgaggacgacgcccgccccgctgagcgaagcgcccaggtcaaggcgcagaaggtgccggtggacttcattgccaaggtcctgagcgacatcgccgacgaggatgacgactgggtccagctcggcctgctgggctcgagcatcagcaagctgcgcccggcattcgacccgcggctctacggcttcaagaagctcagcgacctgatcaagtcgcaaccgaaacggttcgaactcgacagccgagggacgacctcgaccggcggcaaggcgctatacgtgcgcaacctccaggcctcgcgatagcggtctatcggcagcgactcaaccggtgtcggtcatccccgtcatcggccgccgcgaacacgttatgcaaccaatcacgttcgccaggaccgaaccctctcccatcgaacccttctaagcagacacaacttgcggaggtacccatgaccaagccactcctcattgcctgcggcgtcgccttttgcgtgccaatggccttcgctcagacgccgaagcccgaggtaatcacgcacctgaacgggctcgacgtcgaagtcagtgccatgggcgtgccaacctctaccccggaagccggtgtcgagctggtggggatccgcgcggttcgggtgatgaacaaaagcgaagaaaccgtgacctgcgaatttcacgtgccggatgaggcacgagcggatgcgtcggcgccaccggtattcaccgtgacctccaacagccagcgggtcgagcgggtgccaggtgactattcacccgacaagcccttcgcggagctgacctgccgcgccgccgacaagagcatcggtacgccgacgatggcgccttccagcgagcccgccgccgaacctgcgccacaaaagacgaccgatacgcccgatgcagacgaatccatgcgctcgcgcgaaggctccgaccgcagtcgttgaacgctagcggcgccgcaatcaagagatcccaccctgcggtagcgcagaggtacaaggcggctgattaatcgctctcccgcagcgggacgccaccgccaccaggcgagcgatctatcgccattgccccgccctgctcaaccgccggctcagcccagttggttcgcagcgcatcgccgcgtcagcaagcatgcggcccaacgcgactcgccacggccgatcgtcagtcagagacaaaggcacatccgagtcaggcaccgcaagggtggcgtcggcggcattgttgataataattatcaacatatatagcattcgcgcacttccgctcgacgccttatagagaacgaccccatgcgccgcttcatcgtccctgtcctgtcgctccaggcgcttgcctgcacggcccaggccgcagaacagcccgcttcatccagcgagcccatcgccctcggccaaatggaaatcaccgcatcacaagccgagcgcgccgacggcccggtagatggctatcgcgccacccgctcggccagtgcgacacggaccgacacacccatccatgaaatcccgcagtcgatcagcgtagtccccgctcaggtggcacaggatatcggcgcgacgcggctcgaagacgcgctggattacgccggcggcgtcgagcggggcaacaatttcggcggccaagggctgaccgaattcctggtgcgcggcttcagctctcaggagttctaccgcaacggtttcgccgtcaaccgcggctatcccaacatgccggacgccgccaccctggagcgcatcgaagtgctgcgcggcccggcctcgatgctgtatggccgcggcgacccgggcggcaccttcaatatcgtcagcaaacaaccgcaggccgaacgtcgcaccgtgctgggtacccagttcaataccgaagggctgcgccgcggcactctggataccaccggcgcgctggacgagcaggccgatttcacctatcgcctgaacctggtagccgaaggcgccgacagctttcgcgaccacgtcgagagcgagcgctacaacgtcgcgccagtgctgcgctgggacctcagcgccgcgaccgccatcatcttcgaaggcgactacctgcataaccgtcacccgctcgaccggggcgtgacgcgctacgccaaccagcaaggccagttaccgcgggaccgcttcctcggtgaagaaagcgccggcaaattcgccaatgacaacgccacgacccagctgcgtatcgagcatctgctgaatgaccaatggaccctgcgtgggggtgtgcaatacctagacggctcgctggaaggcggcgcggtggagaacaacggcctggccgctgacggccgcaccgtagggcgcaactacagcgaacgccggctggaatggaacgacacggccattcaggccaacctcgaagggcgcttcaacgcgctgggcttcgcccataccctgctgaccggcgtcgaatacgacgacttcaattacaactcgcgtatcgatcgttccgcgggtggcgccaacgacttcccgatagatatctacgaaccggtctacggccagccactgcccgccactcttggcccgaattattgggacgatgaagatctcgagtcctacgccttctatctacaagatcaggtcgagctgaccgagcgtttcacccttcagctcggcgcacgcctagaacgcttcgagcaggagtacaccaacaagctgtcgcccaccggtagctgggaccaggcgcataacgccgtgtcgccacgcattggtgccatttacgacctgaccgaagcattggcggtgtacgccaacgcctcgcgctcattcaagcccaatcggggcgccgatcgctccagtcaggcgttcgaccccgaggaaggcatcgcctacgaaaccggcgtcaagtacgaactgcccgagcacaacctgagcgtgacggcggcgctgttccacatcaccaaggaaaacgtgctgacggccgatccgctggacagcaacttccagatcgccgcgggcgaagtccgcagccgcggcttcgacttcagcgtggccggcaacatcaccccgcaatggcgcgtgatcggcggctatgcctacgtcgacgctgaagtcaccgaaagcaacagcaccagcacgccggtgggcagccgtctggccaacgtaccggagcacagcttcaacctgctggacacctacgagttcgacaacggcgccctggacgggctgggcctcggtgtaggcgtgaagtacgtcagctcgcgcaagggcagcagcaccaacaccgcgttcgacatggacgcctacaccgtggtcgacctgctggcctactacccgctgaccgaccgcgttcgcctcaacctcaacctcgacaacgtgttcgacgaggaatacgacgaacgcgcctggggcaacatctgggcctacccgggtgcgccgcgcaccctgcaggccggtatctccgtcgagctgtaacatcgcctcggctagctcgggaagccgctcgaccgcttcccgagcctgccgcgtcggaacacccctccacacctatcctctgaccgggcagcgacagacgtgtgctttagcgatgcgctctgttctgaatgtgcggcactgacctcaacgggcgcagccgatacgaacaaggaggccgcctagatccggtctaatgggctcaacaccgcgaggcccccacgattgagcacgtgggtatagatcatcgtggtcttgacgtccgcgtgcccgagcagctcttgcaccgtccgaatgtcctgcccgctctccagcagatgcgtggcaaaactgtggcgcaacgtatgcggtgtagccaacttggcgatcccggctgtgttcaccgcacgcttcaaagcacgctgcacgcgtttttcgtccaggtgatggcgacgtacggccccgctgcgtggatccacagacaaacccgccgccggaaatacatactgccaagcccattcccagggcgccttggggtacttgcgggccagcgcgtctggcagatagacatctcccccgccatcggccaatgcctgttgatgtaatacccgcacccgagcaaggtgacgccgcagcggctcaatgacactgacgggcaaaaccgtgacgcgatccttctggcccttaccgtcacggatcagcaactcgttacgtgaaaaatcgacatccttgacccgcagccgcaaggcctccatcaagcgaagcccggccccatacaagagccgcgtgacgagaccgacctcaccttcgaggtgtccgagcacctgctgcacctcttgtaaggacagcaccacaggcagccgcgaaggtttcttggcacgcaccacttccccaagccaaggcaagtcctgtttaagcacctgcttataaagaaacaacagtgcggcaagcgcctgattctgcgtagaagcagaaacatcacgccgaacggcgaggtcggaaagaaacgcctccacctccgctgcgcccatttctgatgggtgacgataattgtgaaaccgcacgtagcgcttgatccactcgcaatagacacgttcagttctgatcgagtagtgtttcagcctgatccgttcacgaacctgatcgagtaatcgcggctttccatccatggtgtataactcccttatacagtcatcatcctcttggaacgcccagcctagacaaggagcgtaagcaatgcaaggaaggttattcaccagtcccgctgggcgtcttatacaccatttggtgtctaattatagttagagccacggaaggaatactgcgtgatcgacaaagcctcaaaaactgcgccgacggtccagacgcatgaagaattccagagctttctagttcttcttgctgaggactataaggccaatggtaaagagtgggagaacgcagaggttggctcatttctagaagcactggccgcttacagcaaaaagacattgacggatattataaaaatacaaatcagcaagtggatttatcagttcccagttggcgagtatttgccgagatgctgtgcggggctcgtgtctatgaataacctccacaattgccacgcgccgcagctctaacaagtggttcaaatcgttcgcttcgctcactgggacaggctaaagcctgccccttaaccaaacgttaggcactcatatgagccatcaggaaccagacaacattcttattccgcttacagctgacgaagctgttgtcctgtttgaattcttgcagcgtttcagcagcacggacgagctaactatcgaggaccagtcggaacaacgagcgctttggaacctttgctgtcttttcgaaaaacacttatctgttccctttgaagctagctacactgaaactctgcgtgctgcacgaaacaggcttagagatgagtgctagtcatgcctaacaagtcgctcaaaccgctcacttcgttcgctgggacggcgtaccgccgccccttagcttaatcgttaggctaaaaaaatgagtctcgacattcaccttgaagccgatgagcgactttcaataaccactgtctctacgacattgagcgaactcggcgcactggatacagacaatgacgaccatacggtggaaggaattttcgaatctggattatcagtgagcgccgcatgcgaactaaatgaccatgcgctatacgcggaagacactaaagacatgaccttccctgtagccattcgctgttacatgcgaataaaagggccggagccagaaggtttttctgcacttggtgatttagagcgttttgtaaaactccttacaaccaaaaccgatgctaattttgtggtttcattccagtacgaatcaacgttgtattggagaaatagtgatggtttgcaggccgcctaactagtggttcaaaacgttcgcttcgctcactgggacgggctaaagcccgccccttaaccaaacgttagagccacggaaggaatactgcgtgatcgacaaagcctcagaaactgcgccgacggtccagacgcatgaagaattccagagctttctagttcttcttgctgaggactataaggccaatggtaaagagtgggagaacgcagaggttggctcatttctagaagcactggccgcttacagcaaagacattgacggatattataaaaatacaaatcagcaggtggatttatcagttcccagttggcgagtatttgccgagatgctgtgcggggctcgtgtctatgaataacctccacaattgccacgcgccgcagctctaacaagtggttcaaatcgttcgcttcgctcactgggacaggctaaagcctgccccttaaccaaacgttatgcactaaggaaagtaatgcgttcagctaacctcattatcaccggcggaattgctacatttaccaccttgctggccatttatacctcgccagtgggaggtcgcgaattgcactattgggcaatgaatctcgggcttttttctagcgcagcccttgtatcatggcttttctttgccatattactaactttcaaaagcaatagactgaaaggtcaactactaattctgtttagttatgcagctgctttaacttgcggcacagtttcgggagccagcttcggggctatctacttcataatgcaggcagaaaaaacgacctttcaagctgctttccaatctgtgtcaatcaccatgattggcggctatgcaattgctattggacttctagcaggcgtatacatttacctttacaaggtaaacaatcctgcgaaaggctcataacaatgcgctcaaatcgctcacttcgttcgctgggacgggctaaagcccgccccttagcttaatcgttaggccactgcatatggaatccataacaccaatcagctctgaggctgcatgcagagaaattatttctcagtggtcacaattgtcggagttggccgattttgctgaacgcagacatggctacggaatagtgatggcgggtttggtataacctatcccggcgaccttgatgaatacgagattgaagtagaaggaatcaagataccaaatggctcagtactgctttatggctatgcgtttgcactgccgccaggatacgagcttttagtttcggagcacgattatttaactgtcttagctcatatttttctcgaacaaaatttgcaaggcgaagccaaaaaagtacgagcgctcatgctaaaaatcgagcagtcttaaatggaaactgcttggcgttctcgcctaacaaacggtccaaatcgttcgcttcgctcactgggacgggctgaagcccgccccttaaccaaacgttagggcaaaaacatgctccttcagctaaacgctaagaaagacaaccacaggaaggttctagcagatttgataaaacgctctgaaatatcaatactgtgctctggatggctgaaacaggcggggcttaaacacttacttcccgccattgatctcgccttaaaaaataaaagccaaatcacaatttactcaaataaaaccatactgatagcgaagcaatagaatctctaaaatcaagagagtcaattctccacatagtagtcgacgacagcgctaaatatcttcattcaaaaatatactactttgaaaccgctggtgaatataaagcaatcataggttctgcgaacatcacgaacggcggattaacttctaacgaagagctttcagtaagcctggcaggaaccattggtgatagccagaacaatcaaataaaaaaatatctagctcggctcaaaaccgtgggccaccctaactagtggttcaaatcgttcgcttcgctctctgggacgggctaaagcccgccccttaaccaaacgttaggtgcccaaagcatgcctgtaggtgtatatagaagagtttttattacatcaaggtgggcaataaagatacctcgaataagaaatattgcttgcggggcacgatgcaacagatgggaggcagagatatggaggcaatggaggccaaaatttgggtgggagcacttatgcccagttcggttctgcgacccttttgggcttattcttgttatggacagagcatcccagccggttacgtttgatgaggttaaatccgcaaacgatctggagtacagcaattattaccccaatgtcgatcttgaatataaggctgaaaactggggagtagttgcaggaaagatggtttgtgtagattacggcattgatgatgccgagcagatttcaaagaaaaggatctactatagagagaggagtcgcacctaacaatgcgctcaaatcgctcacttcgttcgctgggaccggctaaagccggccccttagcttaatcgttatgtgctttctcatgcagccagagataaattaatgaaagtaagcaaccctttaacaatcatagctatatttgccggactggccgaaacactagcgtgcgttgcattgatcaagctgccaatcgaaatacagacaatatttgtatattttgtaatggcatttccatcaggaatagttattttatttttcctagttttatattacaagaacaccgtactttatgctcctggagacttccaagaccagtcgcactatctagaggcaaacaacattaaagaaactgtcggggtgaaaatcgaggagatttttgcggaactaaataagaaaggcaaccacctcaccagggaagaaatagaaagcgcaaaaaatcgcgtcgaaaagacaattgacgagacagctgcactaccaagaaaagagcagatacttgagttcctgaaaaatggccccgctacaactgcacaaataagcaatgagcttaagattcatccatcgtatgtaatcagtatcatgaaaaaattaactgaagatggccaggttcatcgcatacgaaactccggagcaaaatatcttgaatggacgctaagcacataactactggttcaaatcgttcgcttcgctcactgggacgggctaaagcccgccccttaaccaaacgttagggcataaacgtgtcgaaccgttctttagtagcttcaatcgagactggaatttcagagtatgagcaggggaatatggaactccttgcgctggaatgtttgctcgtaagcgctggttccgctcttgacgctatgccttatgatttaatccagcagtttgaggacgtctgcggtgaccttcagatcgaacgtttccgtggcgaagatggttttgtgtctaataccactgagctcataatgagatagagaacatggcttgatcatgtgccgcagtagagccctaacaagcggctcggccatcgtgccgcaattaacaatcgtctcggctcaggcatcttgcctaacaactggttcaaggccgttcgcttcgctcactggaccggctaaagccggccccttaaccaaacggtagatgcttatgatctcgatcccgacagcacggagataacgaaaaactttttgatatggccatattcaaaagcgatatcgaaaaatttttcgcaatcgaagagtgggaaattcaaattgattggtgccttggagaaagagaggctcgacggataacatgccagctaatgacgagaaggaatccgtccgagccaatgaaaattacgaattctcatgcgtctgtcggaagagcagctgctattaaaacagtgcctgtaagacccatttctttataacaagctccccctgcgttgaactaccctaaaaactggttcagccgctcgctccgcgcacagaagctgactaaagccgccgttaaccaaacatccagcccgcgcaggaggattccatggtcctatcagtggaagcatcggttctcgctgtagctcggcagtttgctgtctgctggaatgctcatgacatgtctgcgctcggagcgttgtttgcgcaggacgctgacttcgtcaacgtggtcggcatgcgctggaagggccgcgccgcgatccaggctgcccatcaggcaagccactcgaacatgttccggtcgagccgcctcgcgatcggcaacaccgatatcagactcatgagcccctcggtcgcggtcagtcgatcggagtggactctggtcggtcatacgactccggacggccaagcccttccagagcgacgagggtacctcacgcacgtgctggagaaacaaggtgacggctggctgatcgtggtctcccagaacacggatattattgaatcgccttgattcgcgggcccggctttctggaagtggccgaataacccgttcaagccgacgccgcttcgtggtgtggcctaacccaagcgctagcaggaggatctatgcattctggaagctgtcactgcggtgccgtgaagttcaccgcgcaaggcacgctcgagcaggcgatcgaatgtaattgctctcattgcagccgcaagggcctgctgctgtggttcgtgccccggtccgcattcgccgtgacgactggccaggagaagctcgtcacgtacaccttcaataagcatgcgatccggcaccagttctgttcggtgtgcggttgccaaccttttagcctgggccagagcccggagggggcggaaatgaccgcggtgaacgtccgctgtctggaaggtgtcgagctggagaccgtccaacgcgtcccggtcaatggtcgcgatttctaatcgggcggcagcctgttcgtccagccgcccccgcttcgcggttcgacctaactcaggtatcaagcctgaacgacagcagcgccaaaaacacacgagctgcctagcagttgaaagcgacgccagctcggacgcgtcccgatctggaggcgacgagcaggcgccccgtcgattcatgtgaactaacccggcagcggcacgatccccactaaggcacagtcagaacgattccggcccctagcgcgtgtgcgccatgcaggcctgaatcgtccagcaatgaggacgccctcgtgaccgttatcacccacagtacccaccacaccacgcataccatttcccgccatgtgccgaaccctgtacacgcgacgctgctggccggaaccgttccgttgtttcttggcgggttgttgagcgatgtcgcgtatttccggacctatgaaattcaatggaccaatttctcttcctggttgattgccggcgggttgctgttctgcgggctggcgattctgttcgcgctcgtgaacctggcccgagcccatcagaagaaggggcgtccagtggtttaccttgcgctgctggtagtcacctgggtgctgggcttcatcaatgcactcgagcatgccaaggatgcctgggcgaccatgcccttggggctggtgctgtcggtcatcgttaccctgctggcctgcgcggcgacctggataggcatgaccaacctgcgtgcaggaggtgaggcatgaagcaggcacctgcactttccgtcctcgcgatatccgtgctcctgagcgcctgtggtggcgagggggacaatggccaatccttcggcgcgcagcccaagctgcccgatccgcagcggggcttgctgcccagcatgaagatcgccgaccccgcatcatggggcgatcgcaagcccaccgtgccgagcggctttacggtgacggcgatcgcgaccgacctgaagattccgcgccagacgctgctgctgcccaatggcgacatcctcgtcgccgagggcaagggcggtaacgcacccaagctcaagcccaaggatgtgatcgccggctatatcaaggctcagggcactacctcggtaaaaagtggcaatcgcctgaccttgctgcgtgacgccgatggcgatggccgttacgagctgcagaccgtgtttgccgacaatctcaacgcgccctacggcttggcgttgcatgagggcaagctgtacgtggcgaaccaggacgccctggtgcgcttcgagtatcaggaggggcaaaccgaggccagcgccccgccaaccaaggtcaccgaccttcccgccgagatcaatcaccactggaccaagtcgctgacgatcagccctgacgggcgcttcctctatgtgggtatcggttcgaacagcaacatcaccgagcgtggcatggaagcggaagtcgaccgggcgatgatctggcagatcgacgccgaaaccggcgcccacaagccctacgcaacgggtgtgcgcaatcccacggcgctggcgatccagccgggaaccggccatctgtgggcggtggcgaacgagcgcgacgaactgggtcccgatctggtgcccgactacctgacctcgattcagcaagggggcttctacggctggccctacagctattgggggcagaatgtcgatgaccgggtgcgcccgcagaacccggacaaggtcgcgtcagccatcaagccggactacgcgctcggctcgcacgtcgccgctctcgggctggctttctccagcccggccatgggagacgagttcgccgatggcgtcttcgtcggcgaacatggcagttggaaccgggaacaaccggtgggctataaggttgttttcgtgccgtttagcgacggtcgtccggccggcgaaccggtggatttcgtgaccggctttcgcacggacgaaggcaagacgtttggccgccccgtcggcgtgacggtcgatccggacggggcgctgatcgtcgccgacgacctgtcgaataccgtgtggcggataacccgcagccaataaggctccgttttttcgaaatcagccagcgaccgaagcggtcgttggctacacttcgtcgctccagcaaaactgcccatccgttatcccgcggcgcgacgccggctgcccagaggaatccgaatgatcgttgtctatggcatcagagagcggctcgacccgatcaaggcgcggctatcggatgtcattcacggctgcatgcaggcggtgctcggcatgccggaggacaagcgcgcccatcgcttcgtccccatggaaaaggccgacttctactatccgggcggccgaagcgatgcttataccgtcatcgaaatcaacatgatggcggggcgcaagcccgaaacgcagaaagcgctgatcaagatgctgttcagcgagctcgaacgccagctccacctcgcgccggtcgacgtcgaaatcacgattaccgaacagcagccctatcagtgggcttccggggcatgaccggtgatgaagtccgcgacctgacctacaacatcaaccgatagccgctcgcctgactgcgccaggctcctgaggacacgcccgccatgcccagcctcgaattcctcgtcacttcgctgatcgtcgtgctcattccgggtaccggcgtcgttttcacggtctccgccgggctgacgatggggcggcgcgccagcctgttcgcctcggcgggctgcacgctgggaatcgttccgcatctgctggcaacggtgctcggcctggccgccgtcatgcataccagcgccatggcgttccagacgcttaagtacctgggcgttgcctacctgctctacctggctatcgcgacatggcgcgaccgctcggcgttcgccacccagtcggtcgcagtgggtaacggcgcgctcggcctcgtctgcaaggctttcttgctgaacatcctcaatcccaagctgacgattttctttctcgccttcctgccccagttcatcagcccgaccgccgcctcccctaccctgcagttgcttacgctcagcgctgtgttcatggcgatgaccttcgccgtcttcgtactgtacggcctgctcgcccatgcgttccgcaaggcggtgatcgagtcgcctcgcgttcaggcctggatgcggcgcggtttcgccgccacgttcgccgcgctcggggtgcaactggcggcctcggagcgttgatggcctgacgcgccggtcgatccttcaaggagcctgcaatgcaaagaaagacggtagcgctgatgcaagtcctgttcgccacccaggaactgacgattcctgaagtaggcgtctacgccgagcgacacgggcgcgaattgatggaagctgtcgaaacctacggcttgcagatcgccgggccgtggctgttcgtctcgtacaacctgcccaggaacgaaacggatcgctacaccatggatttctgcctgccgatcagcaatgcgcaggcctacacgggcgagcgattgtccgttaagcagctcggcagttttcggtgcgccagcctggtttacgacggcgtgctgcgggatcttttcactggcgggtatcggccgcttatcgagcagatcaccgcggcgaacctgagcttcaccggcgaaagccgcgaggtctatcacgcctggcacggccccgagtcgcacgaaaaccgtatcgaaattcagttcggcgtggtttgatccagcagtccctcgcgtgggtcgggcgagctcggcgccgcccaccaatgcgggggacccaagcgctgggtaatcacaaggaggcgagacgatgacgcaaaccggtagctgtctgtgtggcggcgttcgatacgagatcgacgggcccctgaccgacgttctgaactgccattgttcgatgtgccgaaagctgcacgcatcggcattccgaacgcgagccaagatccgctcggcggactggaagctcatctccggccgggagctgatcaagttctacgagtcgtctccaggcgagcacaaaggcttctgctcgaactgcggctccagcctgtacacgcgcttcgacgccaatccggacatctacggttttccgctcggcacgctcgacaccgatccaggcgtcgaggcgcagcgccatgtattcgtggccagcaaggcgccgtggtttcacatcaccgatgacctgccccagcatgccgaatatgactgagcgggcgagccgttgagccgcaccatcggccagcgccgggttcggatatggcttggcctctgcgcgttgcatgtgctgctgctgatgctcgccgtcttcaccacggcgctgcgccagacgcctttcgaggccttcgggatgacggcgttggcggttccttatctgctccagcagagcggcttgccggtcttgcagggcaacggcgcgagcggttgggggctgccgtcaccgacgctgctcggctggctgctttcactcatggtctggctcacgttccactggctggttgccttcggagtcgaatggctgatcagacgcgcaacgacccgaggcgctggcgcctgatcgacggcatcgacggcatcgacggcagggaacatcctcggcgcgcgcccgcgatccatcgagggaaccgcgcccgaagttcgaagcgaggccatcgcgggcgcctgccccactgacagcgtccggcctcgggggcgggtgagaccggttcgcgcgggaaagtcgcagatcctaccgagccgccgcgtaggcttcgcacgccgaggcaaaagcctggagcagcttcagcgattcgggattctccgcgatacgccactccgggtgccattgcacgccaatggcgaaacctggagcgtcgcgtacggagacggcctccaccaggccgtccggcgcaaccgcttcgacacgcagcggcgcggccaaccggtcaatgccctggctatgcagcgagttgacctgaaacaccgccggcaagccgatccgctcgaataccccgccaggccgaagcgttaccgcatgctgcggctcgtactgctcggccaacgtatcgctctgcggctcgcggtggtcgagatagcccggcagctcctgcacacgctgatgcagactgccgccgagcgtcacgttgagttcctgaaaaccgcggcagatgcagaacaccggcacgccgcgctcgatagccagacgcagcaacggcagcgtgttggcatcacgatcagggtcatgcgcggtgccggccaggctcgcggggccatcgtagcggcggggctcgacattggatggcgagccggtgaacaggatgccatcgagactatcgagcaagcgttgcggatcgctcggcgtgctacgcgccggtagcaccagcggaaggcccgcaaaggcggctgcctcgacgtacttgtcgccgacggtgtgtgaatcgtatttgccgagctgctgtcggcaggcggtgacgccaatcaagggcacgcgggacatgaacaatcctccaaaaagcccgccagcggatcacgccgacgggtatcgcctcagacacccaggcgatcacgcaactggtagtaggtggcgcccagcgccgtgaacggcacacgtagcagctggccaccgggaaatgggtaatgcggcaggccggcaaaggcatcgaagcgctcggcttgtccgcgcagcgcctcggccagcaccttgccggccaggtgggtgtaggtaacgccgtggccgctgcagccctgggagtaataaatgttgtcgccgatgcggccgacctggggcaggcgcgacagggtcagcaggaagttgcccgtccaggtgtagtcgatgcggacatcgcgtagctgcgggaaggtcttgagcagcttcggccggatgatcgcctcgatgtccgccggatcgcgggcgccatagacgacaccgccgccgtagatcaggcgcttgtcgccgctcagtcggaagtagtccagcagataattgcagtcctcgacgcagtagtcctgcggcaacaggctgtgggccagctcctcggacaacggctcggtggcgatcacctgggtgccgcacggcatggacttggacgccagctccggtaccagcccaccgagataggcgttgcccgccagcaccacgaaccgggctttgacctggccgcgttcggtgtgcacgacaggctgcgcgccgcggtcgatacgaaccgccgcgctctgctcgtagatcgcgccgcccagcgaggccaccgcggccgcttcgcccagcgccaggttgagcggatggatatggccaccactcatgtccagcatgccgccgacataacggtcggtcccaacgacctcccggatgcggcgctcgtccatcaactccagctgggtatgaccgtaccgctcccagagcttcttctgcgcctcgagatggcccatttgcttggtggtgatggcggcgaagacgccgccatccttcaggtcgcagtcgatgccatagcgggcgacgcgttcgcggatgatgcgcccgccctcgaaggccatctccccgagcaaccgcgcctgagtggcaccgagctggcgttcgatgacgtcgatatcgcggctgtagctgttcacgatctgcccgccgttacgccccgacgcaccgaaaccgaccttcgcggcctccagcacggtcacgctgaagccgttctccagcaggaacaaggcggtcgacaggccggtgtaaccggcgccgacgatgcagacatcgcattccaccgactcgctgagttgcggatagtccacccgaatgttgcgtgaagcggcgtagtagctgttgacgtgttgagtcatagggaaccccccggcatctgattgagcgcgcatcggtttcggcgtagcgccggccataccgctggcccggcgaacaggcacgatgcgcgactgtgaatgaatgaacgaagcggcgcgacggccgccagccgcgatagctcgctagagcttgatccaggtggccttcagctcggtgtacttgtcgaaggcatgcaaggacttgtcccgaccgttacccgactgcttgaagccgccgaacggcgcggtcatgtcgccaccatcgtactggttgacccagacgctgccggcacgcagcgcgcgggccgtgcgatgggctcgcgagagatcggcggtccacaccgcggcggccaggccgtacggggtgtcattggcgatgttcaccgcttcctcgtcgctgtcgaaggtgatcactgacaacaccgggccgaagatttcctcacgcgcgatacgcatggcattggtcacgccatcgaacagcgtcggctcgacatagttgccgccggtctcctgcaaagcgcgctggccgccgctgacgagcacggcgccctcctctcgccccgcctggatgaagccgaggacggtttccagatgaccgctgtcgaccaacgcgccgatgcgagtcttcgggtccagcggatggcccggctgccagcgttgcaatgcggcgaccaccagcggcaggaagcgatccttgatcgagcgctcgaccagcaaccgagagccggcgatgcacacctcgccctggttgaaggcgatggcatcggctgccgccgcagccgcggcctccagatccggcgcatcggcgaagacgatgttcgggctcttgccgcccgcttcgagccaaacccgcttcatgttcgattgaccggcatcgatcatcagttgcttggcgacccgggtcgagccggtgaacaccagcgtgtcgacgtccatatgccgcgccagagcgctaccgacggtgtggccaaagccgggcagaacgttgaagacaccggctggaatgccggcatcgaaggctagctgggcgatacgtatcgcggttagcggcgacttttcagagggcttgagcaccaccgaattgccggtggccagggccggtccgagtttccagcaggccatcatcagcgggaagttccagggcacgattgcggccaccacgccaaccggctcacgggtgatcaggccaagctggccatgaggcgtcggcgcgacctcgccgtagaccttgtcgatggcttcggcactccagcgaatggcattggccgcggccggcacgtcgatgctcagcgaatcgccgatgggcttgcccatgtccagggtttcgagcagcgccagctcttcggcatgggcgagcaacagatcggcgaacccgatcagcacacgcttgcgctccgccggcgcgcgcagcgcccagtcaccgcgctcgaagctttcgcgcgcggccttcaccgccgcatccgcatcctcgcccgtgcaactggcgatgcgggccagctgccgtccatcgacggggctgatgcagtcgaagacagcgccgcccacggcgtcacggtagtgtccgtcgataaaggcgcggccctcgatgtgcaaccggccggcgcgttgctcccactcgtttacggtcagggtcgtcatccgttgtgctcctcagaccgtgtgcaggtaccagttgtattcgaggtcggaaatggtgctctcgaattcttgcatctccgcctccttgcaggcgacgaagatgtcgatgtagtcggggctgatgtatttgttcagcacttcgctgtcgtcgagttcacgcagtgcgtcgcgcaggttggtcggcagggcctgctcgagctgttcgtaggcgttgccctccaccgccgggcccgggtcgagctcgttggtcaggccatggtgaatgccggccagtatcgaggccatcatcaggtacgggttggcgtcggcaccggccacccggtgctcgatacgaatcgcctcgctgctgccggtgggcacccgcaccgctaccgtgcggttgtccagcccccagctcggcgcgttgggcacgtagaactgggcgccgaagcggcggtaggagttgacgttggggcagaggaaggccatcgatgccggcatggtttcgaggatgccggccacggcatggcgcaacggagcatgttgttccggatcctcggtggcgaagatgttctttccggtcttcttgtccagcaacgagatgtgcacatgcaacccgttgccggcctggccggggtacggcttggccatgaaggtggtgtccatctcgtggtcgtacgcaacgttcttgatcaggcgcttgagcagcacggcgtgatcgcacgccttgatggcatcctccgcgtggtgcaggttgacctcgaactgcgccggggcgctttccttgacgatggcgtcggccggcaacgcctgttcccgcgcggcctcgagaatatcctgcaggcagtccgagtactcgtcgaggtcgtcgatcaggtacacctgcgtggatatcggccgtttgcccgacagcggagaccgcggcggttgcgggcggccgttcacgttgtcctgatcgatcaggtagaactcgagctcgaacgccgcacagaccgtcagccccagctcatcgaatcgctgcaccacctgacgcagcacttcgcgcggatcggcgaagaacggcgtgccgtccagctcgtgcatggtcatgagcagttgcgcggtcgggcgcttctgccagggttcggggctcagcgtgtcgggaatcgggtaacacacgcggtcggaatcgccgatgtccatgcccagaccggtgctttcaaccgtggagccattgatatccagggcgaagagcgaggctggaagcttgatcccgttctcgtacaccttgtgcaagctcgcccgctcgactcgcttgccacgcacgatcccgttcatgtcggcgatcagcagatcgacgtactgaatttccgggtgctccttgagaaagctgtttgcttcgttgagctgtatgacacgtggggatacggagatcatttcgaaaacatccttgctgccgacgcgctggttcgcagcgaacttgttattggcacgggctgcggggcgccgaacgtagcgggctatcccaggcctgtgagcgatttgattcgcagtagcgagccgagtataaaatgcgcgccagagcaatccatagcggcaaaatcgcaagggatgtttgcgccgatgcaatatcaaatcactcatggcgacctcagcctggtgctcgcactggtacgaggacgtacgctggccaaagccgccgagctgctgcaggtggacgtatccacggtctttcgcgccctgcgcaaactcgaagccaatctggaagtggcgctgttcgaaaagaaccgccggggctatacccccacccagggcggccaagcgctcgccgagcaggcggagcgcgcggaacaggcgctggacacggcgcgaatcgcactgacactcggcgagaagaccatcagcggaaccgttcggctgacgtgcaccgacgccgttctgcgcagcctgttgatccccgtgctctcggagttgatgacgcgctacccggccatttcgctggagctggcgacttccaacgcgttcgccagcctgagcaggcgtgatgcggacattgccctgcgtctttccaatgccccgcccgagcacctcgccggccggcgcttgagcaagagttcctacttcgtctgcggccatcccagctatcgcacgctgtatcaacaggcgcccacggagctagcctggatcgcgcccgatgactccctttccgaccacgtctccgtcgcctggcgtctgcaggcgcatcccaacgtcgtaccacgctatcgctgtagcagcatctcgtcggtggggggcttggttagtgcaggcttaggtgtggctgccctgcctgatttccttatcagcagcctggacggcacggaacgcctgagcggcccgctggagggttgcgataccgacctctggctgctgacgcgcccggacagcctgtcgctccgctcggtacacgtgttcttcaacgagctggccgaactcatccgagcccggctgatcgcctgtggctgcggtgagagtcaaggccgctagcggcgcgccccgtttattgccgcggcctgcggcagcacccatccggctctggtcgtccgggttgccgtgtgttccggcccgcgccaaccagccgccgatgacggcgggcgcgaccagttcatcggcgctatcggccaggatcggcattcggcatagccggcgcgcctagaccacgccggcgaagaaccgttcagcgggattctgccggcaggcgatgagcggacactgcgcctctcgatcaagctgtcagaatgacatcaccaccgccaagcagtggtcattcttgagatcgagcacgagcccgcccaccatgtcttgcgaaaaactctacacaatcgtcctggaaaacagcctggaggtgctcctcgaagcgggcaccatggcgcaggttgaagcgttctgggatgccaacgacagccgctactacggcctgcgcatggaagaggacaacggctgccacgcgcgcgtgatcgtcaccgaccagatccccgaagaggaagacgacgccgagcactgtatcggctgacaggccatcactcttcgtcgattaaacgcgcggccatcgcctgcttgctgtccagttggaagaacagcgaggccgccatcagcgacatggccccgacgcacagaaaggtcaggtgaaacgcctgcagcaccgccgcgccgtcggcgcccggctccgtgaagccgcccagcagagctccggccgacgccacgccgagactcatcgacaactgcacgacgaccgagagcaggctgttgccgctgctggcgttctgttggctcaggccgaccagagtgacggtgttcatcgcagtgaactgcatcgagttgaccatgccgatcaggctcaggtgcaccagcatcaaggcggcaggcgtctgtccatcaatggtcgcgaggctggcgatcagactgccgagcagcaaggtgttgccgatcaagatacgccgatagccgaagcggtcgatcaaaggcttggccagtggcttgatcagcatggccccgaccgccaggggaatcatggtcatgcccgcctgggccggcgaatagctcagcgccacctgcaacagcaacggcagcaggaacggcagcgcaccgctgcccagacgggcgaacagattgccgaagatccccaccgcgaaactgcgggtatgaaacagcgtcggactgaacagcggcttgtcgacatgccccgcgcgcaaccagtaggcggtcaggcaggcactgccgatgaccagcaacaggagcacccgagcgtggggcatctgcatttcgcccagcccttcgagggcgatggtgatcagcaccatggcgccgccgaatagcagaaagccgaagctgtcgaagcgtatccgctccgggcttttcaggtctggcacgaaacgcgacgcggcgaaacagccgatcagcccaaccggcaggttgatcaggaagatccagtgccaggatgcgtattcgaccagccagccgccgagtgtcgggccgatcaacgggccgaccatgcccggcaatgcaatgaaagtcatgacccggacgaactcgctacgcggataggcgcgcaacacgaccaggcgcccgaccggcagcatcagcgcgccgccgacgccttgcaccacacgtgcgaccaccagctggttgaagctggtgctcatcgcgcagaggagcgaaccgagggtgaacagcatgagagcggagaagaagatccgccgggtaccgaagcggtcggccagccagccggacgccggaatcagcagcgccacggtgagcatgtaggcgatgaccacaccttgcatgcgcagcgggtcttcggccagatcacgggccatggatggcagtgcggtatttaggatggtgccgtcgagcgtctgcatgaagaaggcgatggcgaccagccagggcaatacacgggcggttcgagcatccaacatggcagcttgaggcattggcattccccgggtcgaaaagcatatggtaggcccctaacggtctactcgcagcctttatcgtcggacggcgcagagcaccgaccacacatcgaccacgcgaggcgggatccctcgcctgaggtgcgacaacccggcgcaccctcgatgcgcaagccagcgcaggcagcgacctacggccttcatggcaacgaccaggcgtcgaatcggggctatacgttacaaagtatttcgttcacaattgacgcgaatcattatcgttaagcatcacaggtgcgaaccttaacgcgtcaacctacagctcatctaccggaggccttcatgcgcattcccgctactttcgccgtcatctctctgctcgtcgcgccccttgcccaagccaaggaataccccatcggtgagccgcagcagtgcggcggcatggaggtcggcgcggtctacctgcagccggtcgagatggaacctgccggaatgatgctcgatgccgccaagtccgacgtgcacctggaagccgacatctccgctcttgaaaacaaccccaacggctggcaggaaggcagcttcgtttcctacctgaacatccattacgcgctgagcaagaagggttcggacgagaagatcgaaggcgaattccatccgatggtcgccaacgacggcccgcactacggcgataacgtcaagctgatgggcccgggcaaataccagctgaccttcaccgtctcgccgccggatggcaagcacagcatgttcggccgccacgtcgacaaggaaaccggcgtcgcgccctggttcaagacctgcaagctgaattacgagttcacctacgccggtatcggcaagaaaggcggctactgagccggaggtccgccatgcgacgcgtcctgctatccaccctggccctgctcgctgccggctttgccggtggcgcccaggccggactgccgacctacgagctgaccatccgtgatggccatttcgagccgtccacgatcgaggtgccggctcgccagcgcttcaagatcgtggtcaccaatgcgggcaaggggccgaccgagttcgagagcacacccctgcgggttgaaaaggtgctctcgcccggcgtgtcctcgtttgtagtcatccatccgctgaaaccgggtcgctaccccttcttcgacgagttccatatggacctcccggaaggggagatcatcgccaagtagttccttcacaggagaagcgacatgggccaatcaatgttcatcgtctggcgcgaaagcgtcgaggcactgctggtcatcggcatcctgcatgcctggctgagccagcaaccgaacaaccgtcatgcgctgcgcatgctctggggcggcgtcgctgccggtgtcgggctggcctcgctgctggcctggggaatcctcagcgccggcgactggctggccggcccgaccggtgaatggttccagtgcgccatgctggtgatcgccgccctgctgatcctgcagatggtcggctggatgcaccatcacggccgcgacatgaagcgaaatctggtcgacagtgccgcggccagcctcagccagggcagcggcatcggcctgctggtgctggcgatgctcgccgtggcgcgcgaaggcagcgagaccgtggtgttcctctatggcatcggccatcagcaggaaggcgccgacctgaccggtttcgtcatcggcggcgtgctcggtttcgtcctggcgctgctcagctatgcggcgctacaggccggcagccggttcttctcctggaagcgcttcttcaaggtcagcgaggcgctgctgctgttgctcggcgcggcgctgctgatggccgggctcgatcgcttcagcggtcagctgatgggcatggatgtgccagaagtgctctacacggtgttcggcgacccgctgtgggacacctccgccctgctcgatgatggcggcaccctgggcagcaccatcgccgggctgaccggctaccgcgcgatgccgtccttggcggcggtgatcaccatggcgctctactggctggccgtctgggcctggctgcgaccgaagtcggaggctcgactggaggctcgcaccgtatgatcgccaacaccccctggctggcgcggatcggcgatctgctgcgccagcacgccggaaccatccgcctgatccagtggctggtggtcggtttctatctggtcctgctgctggtgccggcggtgctttcgttgccgccgtccgaggcgcgcatgctggacagcatcaccgtgttcgcccagttcctgttctggggtctgtggtggcccttcgtgctgctgtcgatggtcattttcggccggctctggtgcggcgtgctctgcccggaaggctcgctcagcgaatggatcagctggcgcgggctgaacaagcgcactccgcagtggattcgctggagcggctggccgaccatcgccttcgtgctgaccactgtctatggccagctgatcagcgtctacgactacggccgcgccgccgcgctgatccttggcggctcgaccgtcgccgcgatgatcgtcggcttcctttatggtcgcggcaagcgcgtctggtgccggcacctgtgcccggtgagcggcgtcttcggcctgctcgcgcgcctggcgccgatgcactataaggtcgacgaagaacgctggcaggccaaccagggaccgaagctggcgacgcccaactgcgccccgctgatcgacatccgccgcatgcagggcaacagcgattgtcatgcctgcggtcgctgcagcggccagcgcggcgccgtcgccctcgccgcccgttcgccgaaccgggaaatcctcatcgtcggcaaccagtcgcagcacggccactgggacagcacgctgttgctgttcggcatgatcggcctggccatgggtgccttccagtggacggtcagcccctggttcatcaccctcaagcagaccgccgccgagtggctggtcgaccgcgacatcttctggccattggaggccaatgcgccctggtggttgctgacccattacccgcagaacaacgacgccttcacctggctcgacggcgcggcgatcctcacctacatcggcgccagctcactgctcatcggcggcgcgctatggctgctgctgcaaggcgcggtgcgtctgatgaaccgccgcggcgaagtgttcaaccacctggcgctggcgttcacgccgctgggcggcgccgggctgttcctcgggctttcggccaccaccatcaagctgctgcgctatgaaggcttcatcctcgcctgggcacaaccgacccgcgccctgctcctggccggagccatcggttggaccctgacgctggcctggaaagtgatcacccgtcacggcgccaacggactgcgccgcctgctggccttctgttgcgtcggactggcaaccgctgtggtcggttacggctggtatttgcagttctggggctggagctgattcgctcgttacggtagggctgaaacggaacgcggcccggcccaccctacctgactgtgcgacgggcttcgcccatcctgctgcctgctgttcgcggtcaagaccgctcccacggggatgcgtgcacttaaggcggcacgcacctttataggagcggtcctgaccgcgagcttttagcgaagccgcgatgtcggccaactccgtcatccccatcaggcatacggccaatcacgccgcgatggtccacccatgacctgcagctctgccgggcgggcgatgggcttcgtccatcctgctgcttgccgttcgcggtcaagaccgctcccacgggaatgcttgcacttaaggtggcacgcaccttgtaggagcggtcttgaccgcgagcttttagcgaagccgcgatgtcggccaactccgtcatccccatcaggcatacggccaatcacgccgcgatggtccacccatgacctgcagctctgccgggcgggcgatgggcttcgtccatcctgctgcttgccgttcgcggtcaagaccgctcccacggggatgcttgcacttaaggcggcgcgcacctttgtaggagcggtcttgaccgcgagcttttagcgaagccgctcgggcaactccgccatccccatcaggcatacggccaatcacgccgcgatggtccagtccacccacaacctgcagctctgccgggcgggcgatgggcttcgcccatcctactgcttgccgttcgcggtcaagaccgctcccacgggtatgcttgcacttaaggcggtgcgcacctttgtaggagcggtcttgaccgcgagcttttagcgaagcctcgctgtcggataattcagttagccatcaaccgcgcaaaacaaacgagggaaacagccggcccatccgctcccacagcttctgctggtcatagggcgcgcggctttccgcgagggactcgtcgagcatcttcgcggtgcgcacgcattgcacggcgaaccgctcgacacccagcttgcgcaggcgctgggccatatcccacagacgttcggcatcgaacagctgccaatgcacggtggtgcggcactcatagtccacgccgctaccgatgagcgcctcgaggcttttccagttggcctcgccactgccttcgaccccggtgatcagccggccgtgttcgggcaacgccttgacgtcgaagcccacccagtccaccagcggcaacacctggcgaaacagtttcggcttgataccggcgctgtgcagcccgactttgaagcccttggcgcgcacctgggcgatcgctgccgacagcgccagttgcagggtcggttcgccgccgctgaagaccaccgcctcgagcagtccgacgcgctggtcgagaaagccgaggatgtcgtcccagctgcgctcctgcgtgccacaggccggaatcagctcgggattgtggcagtagcgacagcgccagccgcagccctggcagaacaggacgcaagccagatgatcgggaaagtcgagggtggtcaggggcaccaggcccccgacccgcagcgcagcgcccatggctagcgcgccagcccggccgcctgctcggtgaaatgggtgcgctcgcggtgttcggactgcttgcccgggttgaacgccgcgaccgggcggtgatagcccatcacgcgggtccagacttcgcagcgctggcgttgggcttcgggcagttgagtggcgtgggtcatgtgtcgctccttcgtggtgaatgaataatcgtggaagtcccgctcgcaaaagcggtgtcgccgccctcgcgagagggactcggcgtccccctcgcgcatacaggtcggttcggtgtgtcattcgcgacccggctcaggcgcagcaactttgatggctggccagcagcgcctcgtcgcatctggggcagaactcgtgctcgccggcgagatagccatgggtcgggcagatcgagaacgtcggggtgatggtcaggtaaggcaggcggaaacggcccagcgcggtgcgcaccagatgcttgcaggcctgcgccgaggagatctgctcggccatgtacagatgcagcacggtgccgccggtgtacttggtctgcagttcgtcctgcagcatcagcgcctcgaaggggtcgtcggtgaaacccaccggcaactgcgaggagttcgtgtagtacggcgcctcggcggaacccgcctggagaatgtccgggaagcgcttgcggtcttccttggcgaagcgataggtagtgccttcggccggcgtcgcctcaaggttgtagaggtgcccggtctgctcctggaagcgcaccagctgcgcccgcacgtgatccagcagctggaccgccaggcgtcgcccggcctcggtgtgcagcccttcggcgtcctcggtgaagttgcgcaccatctcgtgcaggccgttcacgccaatggtggagaaatgattgcgcagggtgccgaggtagcgcttggtgtagggatagaggccggcgtccatgtgatgctggatgaccttgcgcttgacctccaggctctccttggccatgtccagcagtgcatcgagatgctcgaccagcccggcccagtcgccggcatgcagataacccaggcgcgcgcagttgatcgtcaccaccccgagcgagccggtctgctcggccgaaccgaacagcccgccgccgcgcttgagcagctcgcgcacgtcgagctgcaggcggcagcacatcgagcgcacctggttgggctgcatgtccgagttaaggaagttctggaagtacggcaagccgtagcgcgcggtcatctcgaacagccgctcggcgttctcgctgtcccagggaaaatcatgggtgatgttgtaggtcgggatcggaaaggtgaacacccgccccagcccgtcgccggcctgcatcacctcgatgtaggcgcggttgatcatctccatctcggcctgcagctcgccataggcgaagggcatctcgacgccgccgatataagggatctgctcgcgcaggtcctccgggcagacccagtcgaaggtcaggttggtgaagggcgtctgggtgccccagcgcgacggtacgttgaggttgtagatgaattcctggatcgcctggcgaacctcgtcgtaaccgagccggtccttgcgcacgaagggtgcgaggtaggtatcgaaactgctgaacgcctgggcaccggcccattcgttctgcagcgtgccgaggaagttgaccatctgtcccagggcgctggacaggtgcttgggcgggcccgcctcgacgcgcccggggatgccattgaagccttcgttgagcagcgagcgcagcgaccagccggcgcagtagccggcgagcatgtccaggtcatggatatgcagatcgccctcgcggtgcgcggtaccgatggccgggctgtagacctcgtccagccagtagttggcggtgaccttacccgccacgttgaggatcaagccaccgagcgaatagccctggttggcatttgcgcgcacccgccagtcttcccgcgacaggtattcgttcatcgaagcagcgacgtcgataaccgccttgcgatcccgacgcaggcgcgcatggcgttcgcggtagacgatgtaggcgcgtgccgtgtcgtaatgccccgcttccatcagcacgcgctctacggcgtcctgggcctgctccaccgccaccacccgttgcgacaagcgcgccagcacccgggcggcgagttcgttcgcctcggttgcttcgaattcaccggtcgcccgggctgccgcctcgatcgccgcaccgatcttgctcgcctcgaaggccaccagtcgaccgtcgcgcttgcgcagcgacacgggttgatccacatccacgagcccaggcatcacgtctccatcaccatatgtagataaacaaccaaaagaaaccacaagatgatgtgaaatttagaggatgcccgcccaaagcgaattgaccagagtcaatgcccgtcggctgtttttcaccgccagcatgcgccgcctgcgggccgcgatcttgtctcgaatcaaggaaagatcgtcgtcggcgcttctagcatgcaacctcgaacaatcccggacgcgtaccggtggaggaaccatgctcaccgaaacatcccttgttgcggagcttcgccgccaccacctgttcagccgcctgcccgatggcgcgctgcaggaggtctgtgcctcggccaacctcaagcgcctgcccgccggcgcctcgctgttccaccagggcgacaaggccgagcgcttctacttcctgttcagcggtcaggtgaaattgcaccgggtggtctgcgatggccaggagaagctggtggaggtcatccgggctggcgaatccttcgccgaagcgctgttgttcacgggcgcgccgaactatccggtcagcgccacagcgctcaaggccagcctggtcgccagcctgcacggcgcgcactaccggcgcatgctcgagcagcatccgagcatctgcctggacatcctcgcgaccctgagcatccgcctgcaccaacgcctgaacgagatcgacaccctgaccctggccaacgccagccatcgcgtggtgcgctttctctatcaggagcaggagaacaacagcggcgtggtgacccttgatgtgcccaagcggttgatcgcctcgaagctgggtatccagccggaaaccttttcgcggatcctgcaccggctgatcgagtcgggaatgatcagcgtccagcggcgacgcatcgagatcctagacaaccagggcctggcggcctatcaggagtgacgcacgccgcttgcggttcttgatgatcatcaaacgtgcccggcagcaggagcccgatactgtcggcgaattgcgcaacaggagacgaggatgccgacaccccacctgccgctggtgtacgcctgctcgggctgttccaacgtggcgcagttggccaacaccctcgcggtgcgcctcgaccgcagcggactggcggaaatgtcctgcatcgccggtgttggcggccgcgtcgcggcgctggtcaacaaggccctttccggccgtccaatcctggccatcgacggttgcccgctgcattgcgcgctggcctgcctggcgcagcacggcgtcactccggatgaacacgtcaccctcagcagctacgggctgcgcaagcgctatcggcaagattgctccgcgaccgacgccgacgcactgttcgaggacatgaaggtcatcgtcgccagcgatcggatgcagcggggcgtggataacgacacagcaccggacaggtgacagcggttcggtacatcagtccttccaagcgctcaccaacggtccctccacggcggctggcctcagccggtcacgccctggcggcctgggcccgcccggccgcggccacttcctcaccggccccctgcaacagcttccacagccagcccggcagcgtgtccgggtcgaggctgtcgatcaggttcttgatggccagccccagttcggtgtcgccttcaatcaccagccggcgccggaagaacagcgtatccgggtcttcctggcggctggccagcagcaggaactcgcgccagttaccgcgaatggtcacctctaccggcgcctgtgccgcgatgcgcagcttctcgcgctcgcaggtcaggcaccaggccagaccgaggtcggcgacctcgagccgcatccagtggccgtcgagcacatcgaaggcgccgtcgcttagcgcttcggcgaatacctgattgaggctgcgctccagcgccaggcgctggagcagaaatggcgtcttcgccgccagcggcagcagtcggccgccgagattcaccagatgagcacgcgggttcagcataatccggcctcctcggcacgcagcatgcccggctggccatgccagtaaccgttgcagccatccaccgccagcggcggctgcgcgcccttgcgcaccgcgtcgaaggcgccgatcaccccatccatgccggcagcgcgggggctcaagcgcagcaggtcggcaccgctgtcgaccagtcccgaatagtcggcgagtaggttgctgaccgaggccgacatggtctggataccgttgatggtgaacagcgcctcgccttcctggctgaacagggcgatgccctccgggtagttctggcagcacagctggcaatcatccttcggccggttctcggcgcgggcggtgaagcagcgcgccgaataagcgagcggcaggtggccgtaggcgaagatctcgatttccggcaacgccgcgcccagctccagcaattgcgcgcgggcacgcttgatcagcacgccggaggcttccaccggcggcacccagcgggtcatgccgctggccaccagctcggccagggcatggccgttgtacaggttcagcgccgggccaccgacgaagggtagcttgcgctcggacatcagctgcaccgcgcccatgtcgttggcctccaccagcagctcaccgttgtcgcacagccggcgcaggctggacagctcggaggcggcctcgaccagggtcaggccggacagcaccagttgcgccgaagaggcttcggccaggtcacgggccagccccagccaatcgtcgagcatcaacgcccggcgcttggagcacaccgtttcacccagatagatcacgtccagcggctggctggccatgttggcgtagaagtccagcgtctgctggcgatcccagaagaacagcaccggaccgagagacagtttcatgcgcggatccttgttcattgccaggcccggtggtaggcgcccagggtggtctgcgagccttcggacaggccgtccagcacccgccgccagccgggttcgaccgcatagcgctgcggcgccttgaggtagctgtccagcgccgcacgccagacgcgggtgacctgctcgacataggccgggctgcgttggcggccctcgatcttcatcgcggtgacgccgatggccgcgagttcgggaatcaggtccagggtgttcaggctggtcggctcctccaacgcgtgaaaacgctggccgttgaccatgaagcggcccttgcacagcgtcgggtaaccggccgactcgccctcggcgtagcggtcgatcaacacgtcgttcaggcgtgaagtgagtccttccggctcctcgctccagcgcaccgccttggccggcgaacacacgccgcagaggttcggcgactcaccggtgaggtaggacgaaaggtggcaacggccctcggccatgatgcacaggctgccgaaggcgaacacctcgatcggcaccgggctgctggcggcgacctgcttgacctgcttgagcgacagcacccgtggcagcacggcgcgcttgatgttgtagcgctgctgatagaaggccagcgccgcggcattggtcgccgagccctgtaccgacaggtgcaggttgagctgcgggtggcgcttggcggcatagcccagcaccccgggatcggcggcgatcagcgcatcgacacccagggccgcggcctgatccacagcgcgttgccagcggttccagccgtcgggctgggcataggtgttgacggcgatatacagctgccggcccttctcgcggatcagctgcagccccttgtcgagctgcttttcatccaggttcagaccggcgaaatggcgggcattggtgtcgtcgcgaaaaccgacatagatggcatcggcgccctgctggacggcggccttcagcgcgggcaggctacctgccggacagaccaggtgcatggcaactcctagacatgcaaatcgtgcgcaccgtgcaatggcacggtacccgcccggaccggacggaaagccggcagtctaggtagcggacctgtaacaggcattgatgaacgtcaagggagcgaaccgccacgtaaagcggtaacgcccctcagctggctccaggacggacccgccggggcgctggagcacggcgcggcgtacaggcgccacgctcaaacgcctggtggcgcttcaaacaggcgcgagggcagccggacaggccggcactctactcgcctgcgcgagccgtttcgctacggctcagggtgcaactcagatgccctcatctccttcgaactcctcggtggcccgcgcgaccatctgccgccaggcgccggactcttcggccaacagccgcatggccttgatgctggctgtgaaagcctgttgataatgctgcggatcgttttcgctggcggcgcgctcggcgtggctcagcgcctcggtcagcagcgcgtcgaactggtcgtggtccagggccatgggggctctcctcgatgaagggtaatgtctgcagcttagaccaccgccctctcgacatgactcgcgccagctgatggcaggcgccgcctcggcatcacttcagcttcaatcgcctggccagcttgtgcagattgctcgaatccacgtccagcagccgggccgcctgagcccagttctcgccgctggcctccagcgcctggacaatcgcctggcgctgagcgttatcgacggcttcgcgcagcgggaggatctgcgcttccaacggctgcgcggacgcctcggcaaccggtaccagcgcggcggaccgggtgctgtccaagtcgagcagatcgggctccagggtgaggatttcgctgcgcgaggcaccacggctgagcagccgcagcgccgcgcgactgatcacgtgttccagctcgcgcacgttgcccggccagccataaccgagcaaggcgcgctcggcggccggtgacagccgcatgctgcgcagccccagccgggcgcggttcagctcgaggaagtagccggagaggatcagtacatcgttgccgcgctcgcgcagcggtgggatcggcgccggataaaccgacaggcgatggtagagatcggcgcggaaatgcccgtcgcgcacgctctcgcgcaggttgcggttggtcgccgcgatgatgcgtacgtcgacctggcgcggcttgtcggcccccaggcgctggatctcgccattctgcagggtgcgcagcagcttggcctgcaccaccagcggcaactcgccgacctcgtcgagtaccagggtgccgccgttagccgcatcgaaacggccgggccggtcggtggtggcgccggaaaacgctcccttgacgtggccgaacagctcgctttcggccagcgactcgggcaaggcggcgcagttgaccagcaccagcggcttgttacgccgtcgcgaatgacggtgcagccaacgggcgaacagctccttgcccacgccggtctcgcccagcaacagcaccggcagctcggagtcggcgaccacttccagctcgcgcaacagatcggcgatcacctggctctgcccgaggatttcgccgtctcccggcagcggcgtgctctccagtacgtcggtgcgggccaggcgcaatccgcggttctcgtgttccagccgggtgatgcgaatggccgcctcgatcactagggtgtagcgctgcagatcgcgccgcgcgtcgtcgtcgaaggtgccggcatgcaacgcatcgagggtcagcgcgccccacagcttgccttcgacgaacaggctcacgcccatgcaatcgtgcaccggcaggggttctccgacgtgctcgtccagcagcccatcgtacggatccggcagacggctgtcgggttcgaaccaggtgggctcgcgctgcgagaggatcgccgcgagccgcggatgttgcgccacgacgaagcgccggcccagcgcctcctgcaccagccctatcgccgcgagcgggcgcagggtgtcttcgtccagccgcagcaacaccaccgcgccgcaattgaaacgctggtgtagggtgtgcactagccgttgtagccgaacggcattgggcagctcggtgaccagatcggccagcaacgcttcttccatcatggtatttacgacccttgaggttttttaaaccctacaacgcccaggtagttttaaccaactgtaatttttacggtatgcaaatcaaggacttggccgtggcatggagcttgccctgattggagcatctccacccacggaaatgccaccatgagcatcgcgcttaccgaacagaccctgggcagcctggcctgcctcattcccggcgccacccgcgtgtttcgccagtacaagctggatttctgctgcggtggcaacacgccgctgcgcgatgcggcgctgcaacgcaatctcgacgcacaggccatcgccgaacagctggccgcgctggacagcgccacaccgagcgagccggattggcgcaacgagccgaccgcggcgctgatcgagttcctcctggagcgctatcacgaacgccaccgtgagcagttccccgaactgatccgcctcgccagccgcgtcgagcaggtgcacggcaacaaggccgactgcccgctcggactcgccgaacacctgtgggccatgcagcaggaactcgagagccacatgctcaaggaagaacagatcctcttccccatgctgcaacgcaatatccaactgccccagacccagggaccgatcgcggtgatgcgcttcgagcacgaccagcacagcgccgccctggcgcgactggccgagctgacccaggacatcaccccgccggccaacgcgtgcaacacttggcgcgccctctatcgcgggctggaggaattgcgcgacgacctgatgcaccacatccatctggaaaacaacatcctgttcgccaatgcctcggcacactgaggcacgcgcgcaccagcgggccgccgcggcccgcccctgtagtacggaggcaagatgaaagcgatcattcaacccatggtgtggggcctggctatggccgcgatgctggcgctggcgagcagcgttgcgctcgacctagcggtcagcaccgtgcagcctggcagcaccgaaagccgtacgctcacgccctgaccgcgactctgcaaccggcctgggtcaacacccgggcggcataactgggctaggctcagcaattgttttcggacccgccagccctgaggcgccggcccgagaacgcccaaaatttgaagatgacaggatgccttgcatggtgcttcaccgcgtacataaccagatccttcgcagccaccacctgttcgagccgctgaacgacgagcagatggacgagctgatgagtgccagccagctgctcaacctcgacaagggcgacaacctttttcatcagggcgaaccggcgcattcgttctatttcgtgatctccggtgcgatcaagatctaccgcctgacccccgacgggcaggaaaaggtgttcgaggtgattggcaaccggcagaccttcgccgaagcgatgatgctaatggacacgcccaactacgtcgcctcggcccaggccgtgtgcccgacgcaggtctatcggttctccaacgccgcctatatgcgcctgctggaggcgaaccagaagctgtccttcgcgctgctgggcaagctcagcgtgcgcctgcaccagcgcatcaacgagatcgagacactgtcgctgaagaacgccacccaccgggtggtgcgctacctgatgacccaactggcgcgcctgaaagacgagggaaacagtttcgaactgccgatggccaagcagctgatcgccgggcacctgtcgatccagccggagaccttctcgcggatcatccgccgcctgatcgacgaaggcatcatcacccaggaaggccggcagatcaccattctcgatcgccagcggctggaacagttcgagtgatcgaacacggccggcgtatccgcccgccggcgacataccgcactgggggcggcatttcccagggttgattgccgtcaagcctggagcgccatcgggcatggcaagctgggcgtgacctacggagaacgccgccatgcccaggtgcttgtactgtcaacaacccaacccgccgcaagaagccgaatgcagccactgcggcatgcccctgcccgcgcatgccgacaccgcatgcgaacgacgccagcgcaaattcttctggttctgcatcgccctgaccgtgttctgtgccgtgatgatcgtctggctgccacgccattttttcccaggatgactgccgactcacgtagggtggatcacgcttcatcgatccacgggtggctatccaccaatcggcgtcacggtggatgtaaagagcgacatccaccctacgctgggtcagatctcgtgaatggctccgtagggtggatcacgcttctccgatccacggggcggccatccaccacgccagggcggacggcgacccgcggcgaatggcgccggctcggtgcccgaaaagcttcgccccgagggcgggcctcccacaaaagcagtccgagcatggcgtcgatctataccggtggcatgcttttctgtgggaggcgcgacccgcggcgaatagggctgcaatcccgctgagaagccaaagaagctacgcaaccctgcaagctcgcaaaaccaaaaagcttcgctccgaggcagccttgcacaaaagcagccgtagggtggatcacgcttctccgatccacgggtggccatccaccacgccagggcggacggcggcccgcggcgaatggcgccggctcggtgcccgaaaagcttcgcgccgagggcgggcctcctacaaaaaacgacagtacacacgctgcccttgtgggaggcgcgacccgcggcgaatagggctgcaatcccgcttagagcaaaaaaatctacgcaaccctgcaaacccgcaaaaccaaaagcttcgcgccgaggcggccttgcacaaaagcagccgtagggtggatcacgcttcaccgatccacggggtggccatccaccgagcggaaactcggtggatgtgaagcgcgacatccgccctacggctgggtcagctgcttgtagagctgcggcaggcggaaaggaagctgctgcgggtccttgatcagggtgtagccgttggcgccgaacatgtacggcaggtagtctccggcttcctggtcgatggtgatgcagaacggcagcaggccctggcgccgggcttccagtacagcctggcgagtatcctcgacgccgtagcggccctcgtacaggtccaggtcgttgggcttgccgtcggtcaccagcaacagcaacttgcgccgctgcttgcagttgccgagcagttcggtggcctggcgaatggccgcgcccatgcgggtgtagtagccgggtttgagcgcctggatgcgaccgcgggtgtcgttgccgtagcgctgtttgaagctcttgagctcctgcatgcgcacctgatggcgacgcagcgaggaaaagccgtacagggcgaaatcatcccccaccgccgacaacgcctcgccgaacagcaacaggctgtcagtgatcacatcgatcaccttgtgctcgtcgtccaggtgcgcgtcggtggacatggacaggtccgccagcagcaggcaggccaggtcgcggcggttctgccgttgctccatgaacagaccacgctcggcgcactggccgtgctggcgctcgacgtgaaaatccagccaggcctgcatgtccagttccgagccctggggctggccgcgcagccattgtcggtcgttgcgcaggtgctcgaactgccggcgcagcttgcgtgccagcgggctgagccgcagcggcaggcccatgggttcggagccgcgcggcaacatcatctgcaggctgacgaagttgtcctgcatgtgctgcttgcggtagtcccattccggcagcttgacgccctcgcccagcgggatgtcgtcgacgtccgacggcggcaggtcgaggtgcagcttgaggccgccgcccttctgcatgcgctgacgcgacatggcgatctcatccaggtcctcggcgacgcgcgaagcgtcctcgttctcgctgtcatcgccctggcgatccagctcgacatgctccgaccagctgaacagattctccaggcggaacagcatcaggccgcccttgctggtgctgtcctcgacccgcttggcgcgcttgcgcaggcccttctgctcggtcggtggggcctgcaagcggttgtcctggtcttcttcggtgagttcggtggtctggggcacaccgaggttttccgccgggtacagccacataggcagcggccagggtgcgacttcgctgcgggggaactgcaagacgctgcccggttcgcgcaatgcctggcacaaggcaagttccagctgaccctcggcatgcggcaggctggccgggtccgggcgcagttgcagatgcgcctcgaccaggcgctcgtaacgcggccgcatggccgggaagcgctggagaatggactgggtccagcgctggttatcgcgcgcccagtggcgcatttcgcccgcctgcgccgcgagcaacgccagccagcgatagagatcctggttgagtgagatttcggggtagacggccaggcgctgcggcaaacgcagattgctcgcatcgcaccaggcgacgggcagttgcttgcaggtgccggcgacctgttgcagcaggttgcggcgcaacatcagatcacgcgcgttggcggcctccacgccgacgccgctggccccgcccatcgcacgaaacagcaccgacaggctgcgttgcatgctctccagctcgacgctcgcctcgggaaaatccgggctggcgcggcgggtgatgaagcggtgccagacactgccgacccactcttcgacttcaacggtaaaggccattgcgattactccgttacgccctgtgaaaacggcaacggcccgctcaagtcagccgggccgttgctcatgttgcgatcggactcaggccgtagcgacagcagcggtcgcgtcggcggtgacccggccacgctgcctgaagctgctcaggtagcagatcagaccgatcatgaagaacaccccggcgatcagccgcagccagaagaacacccgcagttgctcggcggtattcatgaaggacatcgctgccccgtcggccggaatccgctgcagccagacctgtaccaggccagcggcagtcaggaacagggtgatcatcaccatcgagatggtcatcagccagaagccccagatctcgacgcgctgagcacgggcatctggcgcttcacccaggccccgcaggcgcggcatggcgtagctgatcatggtcatgatgatcatcgcgtaggcaccgtagaaggccaggtgaccgtgggcagccgtcagttgcgagccgtgggtgtagtagttcaccggtgccagggtgtgcaggaagccccacacgccagctccgaggaacgccgtcacggtagtgccgatggcccagagcgaggccgccttgttcggatgctggcgacggcgacggttcaccatgttcagcgagaacagcaccatggcgaagaacggcagcggttccatcgcagagaagatcgagcccagccacaaccagacctcaggcgcaccgatccagaagaagtggtgaccagtgccgatgatgccggtgatcagggccatggcgatgatcacgtagagccacttctcgatcacttcgcggtcgacgccggtgatcttgatcaggacgaaggccagcatcgaacccatgatcagttcccacacgccttcgacccacaggtgcaccacgaaccaccagtagtacttgtcgcgcgccaggttttccgggttgtagaaggagaacaggaagaacaccgccaggccgaccagaccggtcatcatcaccatgctgatcgccgtcttgcggcctttgagcatggtcatgccgatgttgtagaggaagcccagggcgaccaccacgatgcccatcttggtaatggtcggttgctcgaggaactcgcggcccatggtcggcagcagctcgttgtgcgtcagcgcggcaaggccggcgtagggcacgaagaggtagccgagaatggtcagcacgccggcggcggcgaagacccagaacaggatgatcgccagtttcgggctgtgcagttcgcggtccgcttcctcggggatgaggtagtaggccgcgcccatgaagccgaacagcagccagacgatcagcaggttggtgtggaccatccgtgcgacgttgaacggcagcagcgggaacaaaaagtcaccgacgacatactgcaggcccatgatcaggccgaacaggatttgaccaacgaagagcatcagcgcaaacacgaagtagggtttggcgacggcctgcgattgaaacttgagatgcggattcatgatgctcatctcttagccctccttgtttggcggccagttgttggtgtcgatcttcgaggtccacttgaggaattcggccagatcgtcgacctgctgctcgctcaggttgaactgcggcatcgccctgcgccctggagcgcccagcggctgtgccttcatccacgcctgcaggaagggcttgaaggccgcatcctcgccgcgacgcacgaagacgttgcccagctccggcgcgaagtaggcgccttcgcccagcaggctgtggcagccgatgcagttgttgttctcccagacggccttgccgcgtaccactgactcggtcagcgtcgcttcgttggaacggtctggaaaggtctgctctgtgtgataggtcaggcctagaaacaccaggaagaagaacacgcttcccccgaagtagatgtttctggccatccccttagtaaaggtctcggacatggtcgcctcctcatggcgttggcgtggccagtttaagaaggcagctatcgaaacctgcttgatgacaatcaagaaaaacctgaacgtgaaggtcgggtttattcgggtgctgaaaagctcgcggtcgagaccgctccccacaagtctgtgcacaccgtgggagcggtcttgaccgcgaagcttttgcttcaaacgagcgatgtgggattggctagtaccggggcagcatggggtacacgcagacgctgaagagctcgcggtcgagaccgctcctacaagtctgggcgcatcgtgggagcggtcttgaccgcgaagcttttgcttcaaacgagcgatgtgggatcggttaggaccggggcggcctggatacatgcagacgctgacaagctcgcggtcgagaccgctcctacaagtctgtgcgcaccgtgggagcggtcttgaccgcgaagcttttcggactcaaacgcactgcgcggcatcggccagtactgggggcggttctggggttacatgcagacgctgaagagctcgcggtcgagaccgctcctacaagtccgtgcgcaccgtgggagcggtcttgaccgcgaagctttgcttcaaacgagcgacgcgggatcggctagtaccggggcggcctggggacacatgcggacaccgaaaagctcgcggtcgagaccgctcctacaagtccgtgcgcaccgtgggagcggtcttgaccgcgaagctttttggattcaaacgcactgcgcgggatcggctagtaccggggcggtatgggggacatgcagtcgctgaaaagttcgcggtcgagaccgctcctacaagtctgtgcataccgtgggagcggtcttgaccgcgaagcttttgcttcaaacgagcgatctacaccatcatcgccaacaggattccgccggccatcgccaggggccagcagagcagcagcaggcgccacattcgcggtgcgtggcgcagttccatgaagccatcggatatcagccaggccttgaccagcgcaaccgccagcaccccggcggcgagtagcagggtcgagccggagctgcccagcagcacggtgagcgtggtcagcagcgcaaggccgaaccagcagagcaccagcacaatcgacgcggacatccgcccctcctcaattgatgatgtaaaccagcgggaacagcagcacccagaccatatctaccatgtgccaatagagcaccccggactccagcccggcgcagtccgacgccgtgtaggcgcggcggcggcagcgctcggccatccagccgagaatgaccatgcccagcagcacatgcaggaagtgaaagccggtgagaatccagtagagggtgaagaaggtgttgtgctccagccccaatcccagcgcggacaggtggctgtactcgttgagcttgagcaccacatagacgcaggcgctgatcagcgcggtcagcagcagcaccgccgcgcgccgcgactgggccatgcgcacctgctctaccgccagggcggcgaacaggccggaggtcagcaggctcagggtcagtgccaggccgatcgagctgtccagcgccgcccggctttcatggaacagctcggggttgagccactgcgccacggcaaaggccaggatcagaatcgcgaagacggtcagctcggcgaggatgaagaaccacatcgccagatcgcccggcaatcgccgcgtggtgcgcgcctcaagcgaagtggacatcgaccacatccatcagcgccgcgacggtttgcgcatcgtccgacagcggctcggccaggcaggccaggcaggcttcccgcgggctcatgccggcgcggatcatccgcgcggtaaagatcagcaggcgggtcgaggcgacctcttccagatcatgctgctcgaggcggcgcagggcctgcccgagcttgaccacctgcgcggccagctgagtgtccacctgggcctcgttggcgacgatgcgctcctcctcggcggcggccggatagtcgaagcgcatcgccacgaaacgctgccgggtgctgggcttcatgcccttgagcaggttctggtagccggggttgtagctgaccaccagcatgaaacccggcggggccttgagcgcctcgccggtgcgttcgatgaacagctcgcggcggtcatcggccaaggggtggaggaccaccgcggtgtcctgccgcgcctcgaccacctcatcgaggtaacagatgccgccttcacgcacggcgcgggtcagcgggccgtcctgccaccaggtgccctgcgcgccgatcaggtggcggccgaccagatccgccgcactgaggtcatcgtggcaggccacggtgtacagcggcaggttgagccgatgggccatgtgctgcacgaaacgggtcttgccgcagccggtcggtcccttgatcagcaccggcatgccgtggcgccaggcctgctcgaagagcgcctcttcattgcccagcgactggtaaaacggagcaccaggcaggtcggcaaacttctcgggcgcgttcattggcaatacctcacggcggcagttggttaaacatctgccgccaaactaaccgtcaggtcaggcgccctcaaggcgtcctccggcgaagcttgattacggtcaagcccagcctcaaatgagcgctcgcgaaccgaccggcagccccgtccggccggctttcctttcccttctcgccacgcgcaaccggcgcccccgcgacacggcgtcacgccccgggcatcaccacggctctcttgattgccatcaagcgctttcgcgcggagcccaccataggatgcaaccgcacacagcaagacccgggaactgccacatcgccgtcactagcaggaaccgcacgaagcggtcagaggagaaaggtatgagcaaacatttactggcaggcgttctcgccggcttttcactgctcggtctggcagtcgcccaggcagcggtcaatgcggaaaacgccgacgcggcgctcaagggcgaggccagcgtcattgatccggcgagcgcccaggtgctccacacacccggcgcgccggacctgagcaccgctgaattcgacaaagccaaggaaatctacttccagcgttgcgctggctgtcacggcgtgttgcgcaagggcgcgaccggcaagccgctgacgcccgacatcacccaggagcgcggccaggcctaccttgaagccctgatcacctacggctcgccggccggcatgcccaactggggcacgtccaatgcgctgaccaaggatgaaatcaccttgatggccaagttcatccagcacaccccgccgacaccgccggaatggggcatgggccagatgaaggattcctggaaggtgctggtcaagccggaggatcggccgaagaagcagatgaacaacctcgatctgcccaacctgttctccgtcaccctgcgcgacgacggtaagatcgccctgatcgacggcaagaccaaggacatcgtcaagaccatcgacaccggctacgccgtgcacatctcgcgcatgtccgcttccggtcgctatctgttcgtgatcggccgcgacgccaagatcgacatgatcgacctctgggccaaggagccgatcaaggtcgccgagatcaaggtcggcgtcgaagcccgttcggtggaaacctcgaaatacaagggctatgaggacaagtacgtgatcgccggcgactactggccgccgcagttcaccatcatggacggcgagaccctggagccgctgcagatcgtctcgacccgcggcatgaccgctgcgacccaggagtaccacccggaaccacgcgtggcggcgatcatcgcgtcgcacgagcacccggagttcatcgtcaacgtcaaggaaaccggcaaggtcatgctggtcaactacgaagacatcgacaacctgaccaccaccacgatcggcaccgcgcccttcctgcatgacggcggttgggacgtcagccaccgctacttcatgacggcggcgaacaactcaaacaaggtcgcggtgatcgactccaaggagcgcaagctggctgcccaggtcgacgtcggcaagaccccgcacccgggtcgcggcgccaacttcgtgcatccgaagttcggtccggtctgggccaccagccacctgggcgacgagaccatctcgctgatcggcaccgacccggacaagcacccggaccaggcgtggaaagtggtcgagaccctcaagggccagggcggcggctcgctgttcatcaagacccacccgaaatccaagcacatctacctggacaccaccttcaacccggacgccaaggtcagccagtcggccgcggtgttcaacatcgacgatctgggggcgggctacactgtcctgccgattggtgaatggtccggcctgaccggtggagccaagcgtgtcgtgcagccggagtacaacaaagccggcgacgaagtctggttctcggtctggagtggccaggaggagcaatcggcgatcgtggtggtcgatgataagacgctaaagctgaaaaaggtgatcaaagacaaaaggttgatcaccccaaccggtaaatttaacgtctacaacactcagcacgacgtgtactgagtgcccatcgggggagcgcagactcccccaccctagccttgaggaagtaactgatgaagaaagtactgatcccactgctcgccctcggcggcgcaatggtcctgcagccagccatggcacaggacggtgaagcgctgttcaagagcaagccttgcgcggcctgccacagcatcgacaccaaaatcgtaggaccgtcgttcaaggacgtcgcagccaagtacgccggccaggaaggcgctgccgacctgctcgcaggccacatcaagaacggcaccgtaggcgcctggggccagatcccgatgccgccaaaccctgtcaccgaagaagaagccaaaaccctcgccgagtgggttctgagccataagtaacacctaaggaggacatcatgcttcggtcccgccacgcagttatcggtttggggctcaccctggtgtccctcctccccttttccacggccctggcggccggcgtctcagccgagcgccagggtcagctcgaacgcctgctgttgcaggactgcggttcctgccatggcatgcgcctgaccggcggcctgggccccgcgttgacccgccacgccatcgccggcaaaccccgcgaaaccctgatcgccaccgtgacctacggtaggcccgacactgcaatgcccgcctggaacgccctgctcagtgagcaggacatcgcctggctggtcgaccgactgatcgaaggaaaacccacgccatgatgcgtccaaccctgttgctggccgcggccagcctgctgctcggcgcctgtgccgggcaaccactgcgtggcaccggtgacctcggcgtggtggtggagcgtgccaccggcagcctgcagatcgtcgagaccaccggccagacacgcctggcccgcatagaggggctcggcgacctgtcccacgcctcggtggtgttttcccgcgacgagcgcttcgcctacgtcttcggccgcgacggcgggctgaccaaggtcgacctgctgcgccagcgcatcgacaaacgcgtcatccagggcggcaacagcatcggtggcgccatcagccaggacggcaagctgatcgccgtcggcaactacgagcccggcggcgtgaaagtcttcgacgcccagacgctggagctggtcgccgatgtcccggccacgccgctggccgacagcagccgcaattcgcgcgtggtcggcgtcatcgacgcacccggccggcgcttcatctacagcctgttcgacaccggcgagagctggttgctggacttcagccagggcaacacaccggtcgtgacccgcttcgagcacgtcggcaagcaaccctatgacggcctgctgaccccggaaggccgctattacatcgccggtctgttcggcgaggacggcatggccaagatcgacctctggcaccccgaccgcggcgtcgagcggatcatcgacggctacggccgtggccagaagaaactgccggtctacaagatgccgcacctggaaggctggacggtggccggcgatcagaccttcgtccccgcggtcggccagcaccgggtactggtgatggacacgcagagctggaagcagaccgacgccatcgacgtcgccggccagccggtgttcgtgatgtcacgcccggatacgcggcaactctgggtcaacttcgcccacccggacaacggcaaggtgcaggtgatcgacacggaaacccaccagatcatcaagaccctcgaacccggtccggccgtgctgcatatggaattcactccgcgcggcgagcaactctggctgtcggtgcgcgacggcaacgaggtgcaggtctgggatccctacacgctgcaactgctcaagcgcctgccggccgacagcccgagcggcatattcttctcaagccgcgcccacgagacggggttgtgacatgcagatcgacgccctcagccgccgcctgatcgaccgcttccagcacggcatgccgctgtgcgccgagccctaccgcgccatggccgaggcgctggattgcagcgaagccgaggtgctggcctgcctcgaggccctggagcacggcggcggtctgtcgcgcgtcggcccggtgttcgagcacagccgcgccggcgccagcaccctggtcgctctggcggtgcccgaggcgcgcctggaatcggtcgcagcgctgatcaacagctatcccgaggtcaaccacaactacctgcgcgagcaccgctacaacctctggttcgtggtgacgggccccgaccaggctcacgtcgaggcgctgctggcgcggatcgaggccgaaaccgggctcacgccgctggatctgccgatgcgggcggcctaccgcatcgacctcggttttcccatcggagacgcgccatgaccgccctgctcgatgacctgcaaaccctgcagctgcggcgcctgctcgaagccggcctgccactcgtcgcccgcccctaccaactgctggccgaacgcatcggcgccagcgaagaggcggtgctggatcaggtgcggcgctggaacgacagcggactgtttcgtcgcatgggcctcgtgatcaagcatcgcgccctgggctttcgcgccaacgccatgctggtgatggacatcccggacgagatcgtcgacgcggtcggccagcgcctcggccgggccgccggcatcaacctctgctatcagcggccgcggcgcctgcccgactggccctacaacctgttttgcatggtccacggccgcgagcgcgagcaggtctgccaattgatcgccgcgctgctcgccgaacaggggctgagcgacgtgccgcaccagctgctgttcagcacccgcgccttcaagcaatgcgggggccgttacgccccgcccgcaatgccggtggcggcccatggatgagctcgatcggcgcctgatcaaccgcttgcagcatggcctgccgctggtccgcgatccctggcaggcattggccgaagagctggacgccgacgccgcgcaactgcgcgaacgcgtccaggccctgctcgacgacggcaccctgacccgcttcggcccgatgttcgacatcgaacgtctcggcggcgcctttaccctcgccgcgctgtcggtgccggaagaacgcttcgatcaggtcgccgaacggctggcggcgatgccggaagtggcgcacaactaccgccgcgagcacgcctggaacatgtggttcgtgctcggctgcgccaccccgcagggcatcgccgagaccattgcccggatcgaagccgaaaccggcctgccggtgctcaacctgcccaaggaggagacctaccatgtcggcttgcacttcgccgtttgagcctgcccagcaggccgagctggcccggcgcctggtatcgctcaccgaaggcgggctgccgctggtggacgatccctggggttggctcgccgagcgcctggagctgagcgtcgaggccaccctcgcactgctgcagcagctacagaccgggggcgccatccggcgcatcgccgccgtacccaatcactaccgcctcggctaccgccacaacggcatgaccgtctgggatgtagacgatggggaaatggcccgtctcggcccgttgatcggcgcgcaggcgttcgtcagccattgctatcgccgtccgcgccaggatggctggtgctacaacctgttcgccatggtgcacggccgcagcgccgaggagatcgacggctaccgcgccgagatccgcgcactgctcggcaacgcctgccgcgccgacgagatgctggtcagcagccgcatcctcaaaaagaccggcttgcgcgtgggcagccgcacctgaagccgctgctcgcgcgccgcacgagccgggccatcagaaccgccattcgggcttgaacagaccgatcacgaagaagagcgtggagaagctccacacgaccagcgcatacaagcggatctgctcggcattccacggccatgcgaaccagtccagaacgaccatgctcttccagccctcgatccactgggctccgccccagctgatgatccatttccagaacacgctgttgagaaggtaaagcgcaacgaattcgagggtactcatcggcgcgtccttaaatgtccttgcaaggaagccggcaagcccggccagctgtctatcccatccaaacgggatgttcgcgacgttatcgggacggcctttttgcgtccatcaccgctgataaccgtgcgttccgtttgtgatgaaggccaggtccgtaggttggaataaccgcaggcgtattccgacgcacgccgtaaccgacgcaagcgcttacggcgcaagcatcctaccggcagcggcgtagggtggatgtcgctcttcacatccaccgatgtttcgcgcggtggatcggtgatcggagaagcgtgatccaccctacgggcaggtgccgcgaaacgcttccggcgatcaccgcgatttggcggaacgcgaccctacgcatcggagcccggcctgcgccgctgctctgccaaggcgcgggggcccacctctttattgtttgcggtcaaggattggcattcgccagtcggtgatgctgcctccatcgaaacacgcaagacgcgtgacgcgaggagaccccctcatgctgagaatcagccattacctgcgcgccctcgcccggcccgccatgccggtactgggcgcacgcagcaccgctggcgcacggccaccggtggtgatctggaacctgctgcggcgctgcaacctgacctgcaagcactgctacgccacctccgccgacagcgagttccgcgacgaactggacacggccgaagcgctcaaggtgatcgacgacctgcacgaggccggcgtccgcgtgctgatcctctccggtggcgagccgctgctgcgcgacgacatcttcgagctgtccgaatacgcgcggctgcgcggcttcttcgtcgcgctgtcgaccaacggcacgctgatcgacgagggcaacatcgagcagatcgccgcggcgaaatacgactacgtgggcatcagcatcgacggcctggaagcggtgcacgacgactggcgccagctcaagggcagcttcgccgcgtccatacacgccatcgacctctgccgccagcacggcatccgcgtcggcctgcgcaccaccctgacgcagaacaactacccgcaactgccggcactgctggcgctgatgcgcgaacacgacgtgcagaagttctacctctcgcacctcaactacagcggccgtggcaagcgcagccgcagccgcaaggccgacgcccatcaccagatgacccgcgacgccatgtaccagctgttcgagcaggcctgggacgacgtgcagcacggccgcgaaaccgatttcgtcagcggcaacaacgacgccgatgccgtgctgctgttgcagtgggtcgagcagcgcctgcccgaacaccgcgaccgtctcgagcggatgctgcgcgcctggggcggcaatgcctcgggcagcggcatcgccaatatcgacaatatcggcgatgtccatccggacacctactggtggcagcacaccgtcggcaatgtgcgccggcagtcgttccgcgaactctggctggaccaacccgagccgctgctcgccgagctgcgccagcatccccgcgcagtgggcggacgctgcgccgagtgccgctggctgtcgatctgcaacggcaacacccgtacccgcgcctgggccgagggcaacctctggggcgaagaccccggctgctacctcagcgatgaggaaatcggcttaccgcaaccgcagcgcattcccgccgtcgccctttgataccgagcgcggccccgaggccgcccaagacttaccgccgtccgatgagattttcaggagttcgcatggatcagccaaccactctccccgctgcactcggcgccacgctggcccctggcgaagtcgccctcgtcggcgccggccccggcgatccgggcctgctcaccctgcgtgcctggagcctgctgcaacaggccgacgcggtggtctacgaccgtctggtcagcgaggatctgatgcaactgctgcccgcccgttgcgcccgccattacgtcggcaagaccagcggctaccacagcctgccgcagccacagatcaaccagttactggtggaccttgcccggcagggcctgcgcgtggtgcggctgaaaggcggcgaccccttcatcttcggtcgcggcgccgaggaactggaattccttctggcgcatggcatcaacggccaggtggttccgggcgtcaccgccgcagccggatgcagcgcctatgccggcatcccgctgactcaccgcgacctggcgcattcctgccagttcatcaccggccatttgcaggaagacggcgcactgcaactaccctggaccagtctggtcgagggcaagcagacgctggtgttctacatgggcctggccgcgctcggcgagatctcgcgcaacctgatcgccgccggcctgccggtcgatactcccgcggcgctgatcggcaacggcacccgcgccgaccagcgcgtggtgcgttgcagcctcaagcaactgccgagcatggcgcaggcgcaccagctgatgccgccaaccctgaccgtgatcggccaggtggtcgggttgttcgccgacaccacactggaattcccggctcggctacgcgccgatcgacacatacaatccgcaccgcaggaggctctatgcgagtagttccgctagtgctgttggcactctctggtgcgattcaggcagcgcccgaggtggcgggcctggaacaggccggcgcgctttacgagcaacactgtcagagctgccatggcgtcgatcgtctgggcggcgcagggccggcgctgctgccggagagcctcagccgcctcaagcctgacgaggcacgcgaggtcatccacaacggtcggccggccagccagatggcggcgttcggcgaccgcctgaacgatgcacagatcgatggtctggtgagctatctctatcagccaccggcgaccccgccgacctggagcgatgccgacatccgcgccagccaccgcatccttgcagacgtttccaagctaccgagcaccccgcaacacggcgccgacccgctcaacctgttcgttgtggtcgaggccggtaatcatcatgtgcgcgtgctggacggcgagcgctttaccgagctggccaatttcccgtcgcactacgccctgcacggtggcccgaagttctcgccggatgggcgcttcgtctacttcgcctcgcgcgacggctgggtcagcgtctacgacctcaacaacctgaccatgatcgccgaggtccgcgccgggctgaacacccgcaacctggccgtcagcaacgatggccgctgggtgctggtgggcaactacctgccgggcaatctggtgctgctcgacgcccgcgacctgtcgctggtcaagcacatcccggcggtcaccgcggacggcacgccgtcgcgcgtcagcgccgtctacaccgccccgccgcgcgacagcttcgtggtcgcattgaaggacgtgaaggaagcctgggagctgtcctatgccggcgagccggacttcaaaccacgtcgcatcgaggccgccgactttctcgacgacttctccttcaccccggactaccgctacctgctggccacctcgcgcaaggccctcggcggccaggtcatcgacctcgacaccggcaaggcggtcaccgacattccgctgccgggcatgccgcacctgggctcgggtatctactggaagcgcaacggcaagtgggtcttcgccacgcccaacgtgagcaagggcctgatctcggtgctcgacctcgagacctggaagctgatcaaggaaatccccaccgaagggccgggattcttcatgcgcagccacctgaactcgaaatacgcctggacagacgtgttcttcggcccgaacaacgacgccgtgcacctgatcgacaaacagaccctggaaatcgcccacacgctacgcccgatgccgggcaagaacgccgcccacgtcgagttcaccaacgacggccgctacgccctgctcagcgtctgggacaccgacggcgcgctgatcgtctacgacgccaagacgctggaagagatcaaacgcatcccgatgaacaaaccgtccggcaaatacaacgtcggcaacaaaatcgagttcgccgaggggacctcgcactgagggctggccgtcccggtaatagccgctgccccttcgtggtttgaatcaaaagctcgcggtcaagaccgctctcacagatgtgcacagacttgtgggagcggtctcgaccgcgagctccagtgtccgaggcgccccaaaccgtcccggtattaaccgttgcccggtcgtgcgtgtgaatcaaaagcttcgcggtcaagaccgctcccacgagtgtgcacagacttgtaggagcggtctcgaccgcgagctctctagtgtccgaggcgccccaaaccgtcccggtaatagccgctgcccggtcgtggtttggatcaaaagcttcgcggtcaagaccgctcccacaggtaataccgccttgtaggagcggtctcgaccgcgagctctacggtgcccgaggcgccccaaaccgtcccggtaatagccgctgccccgttgtggtttggtggatcaaaagcttcgcggtcaagaccgctcccaccggtgtgcacagacttgtaggagcggtctcgaccgcgagctctacggtctatctgccccttcggtaccctggtccacttccaccattgatcccaacctgctttcatatcactccctttgatatgagcgccgctttccatggatatcgatctcgcccgcacctttctcgagatcattcgcagcggaagcttcatcgccaccgccgagcgcctgcatgtcacccagacggcggtgactgcgcgggtgcgtagcctggagacgcagctcggttgccggctgttcgtgcgcaaccgggccggggcgcggctgacgccggacggcgagcgtttcgtcgcctatgccacgcaactggtgcagacctgggaaacggcgcggcgcgacctgccgctgccgcgcggctacgacaagctgttgtcgcttggagccgaggtcagcctgtgcaacccgctgatgcttgcctgggtccagcggctgcgccaggccatgcctgaccatgcgctgcgcaacgaggtggccagtggcgatgagctgcaaaagcaactcgacctgggcgcgctggatgcggcattggtgcaccgccccgagtactggcccggattgcaggtcgagcaactgctcgaggaaaaactcatccaggtggtgcatgcgaccgagccggatccttatctctacatcgactggggcccggcgttccgtcagcagcacgacctttccctgccgggccatatgcgcgccgcactgtccttcagcctcgggccgctggcgctgcagtatctggttcagtgcggcgggcgcggctacttccgcacgcgcgtggtgcagcgctatctcgacgaaggcatcctcaagcgcgtcgagcaggcgccggaattcagctacccggtctacctggtccattcccgcgcggcgcagtcgccggccttgttcaaggcactcgaactgcttcgcgaggtcgcccgggacgactacgactggtcgcgctggaactacgcgatctgagccgatccggccgtcagttgctcaggcgcttcatccagctctgctcggcgggtgcatgcagcgcagcaggaacaggcaggcgatcgccagacacaccgccgtcacggccgcagccaccggcgtcaggccgcagaggccgagcgtcaccccgatcgccacggcgatgaggttgccaccgatcaccgaccagggctgggcgaacgggctggacgaggcgctgaacaggatcaccgccgaggcgccggcgggcgcgacgatatgcagggtcacggggccgccgaacaccagcagcccgaccgccaccatcggcagcactaccagcccgacgccgatcacggcgcgaatccagtgcttgtgagagacactctggggggccgggaagaaggaccgcaaccagtggctcaggcgttcttgcatgggctctgcttgttcggaaggggttggcttgtcaggcactgtaccagcagccgggttcccctagtctccgcgagatggtcgtactcagtcgggcaggtgcttcagccagttgcggtagagcgcggcaatgaggtcggtctgggtgatcatgccgaccagccgctgttggtcgtcgacaaccggcaggcagtgcagaccgcggtcggacagcaggaacaccagatcgaccatgtggctgtcctcggttaccgagaccaccggtgtgctcatgatcgtgcgtagctggacgccgcgcaggaacttgagctggccgaacttgatccgtgccgacgccggctggaagtgcttgagcagatcgaccagggtcacgatacccaccagacggcggctgtcgggctccagcaccgggaacgaatgcagacggtgttcgcgcagcgtttgccaggcctgttgaatcgagcagtccggcgtgccccagtagaggtcgcgggacatgatgtcggcggcggtgatctcgcccatgctgcgccgcaacgcgtgcttttcggtctgtttgatcaactgggcgagatcgtcgcgggtgacgtcgacgtattcgccgaagtcggccagcgcgcgctcgacatcgtcctcgctgaagctcatgcgctcactgggcagggggtcgtgagtgtggtgcgggttgcccttgtgcgggcgcggcttgggataagcatgcccgctgaggttgttgtagaggagcgcaaccgagaccagcagcagcgaattgaaggccaccggatagagcagttcgaagccgaaagcgtgcacctgcgggctacctatcaccgccaccagcgccagcgccgcggcaggcggatgcaggcagcgcaggatgaacagacagaggatcgccagggccccggcgatgccggcagcggccgcgactggcaagtcgctggcggccaacgctacgccgatcgcggtggccagcaggttgccgccgatcaccgaccagggctgcgcgaaggggctcgacgacgcggcgaacaccagcaccgccgacgcggccgccggcgccaccaacggcagcgagatactgctcccgaacaccagcgcactggccggaatgatcagcagcaataccagaccgataccgatggccgcgcgcagccattcggccgggcgcgcagagagaggcgccggggcgaaggaacggcaccagtcgataagacgttgttgcatgcgacctgcttgagcgaaggaaggcggtacggtggccgtccgggaggacgagataccacgaacaggcggggcattggcgcacggaaaagaggcaccagccagccgggccgcacattgtcggtgcgtctgggccgtgctgccaatgaatcctgttgatgcttcgatgcaaaatttttgttatcaacgccgcggctgccttggcgctcgacccgcgggccgcagcccatcaggcgcttcacgccggtgcgtgagacggccgggtgctggcttcgtactcgtcgatcagcgccgcgacaatgcgcatcacctcgaggttggccgtctccatcccgccgaggtgcccgagcgtgtcctccagcgcctgtcgagcaaatgcctcgagtgcccgctgcccttggtgatgcacggcggtgtgcggccgctcgatccgctggaagtgcgccaggcgctgcatgcgccggttatcctccgcgtagtaccagcgcccgaaccgacaatcgcgctcgctgggcaacgtcggaacgctctgctcggcagcgcctaggacctggttgtagacgacgaacttcaacgacagctcgtccagattggccagctcgattcccgcgcggaacgaggaatgctcgatgccgtcacgcatgcttccggccaatcgatgcaggtgctgcatgccggcgacggcgctggccgtggtctggctgaacccctgcgccaggtttccctgtagctggatgtactggtgcacgtcggcgatctcggcctgcacctcggtgatcttgcggacgatgtcggcggtggccagcgcggttcgttccgccagggtgcgaacctccccggcgaccaccgcgaaaccgcgcccggcctcccccgcccgcgccgcctcgatggcggcgttgagcgcgagcaggttggtctggctggcgatgccgctgatgaggtcgacgatgccgttgatctcctgcgaatgctccgccagggccttgaccttgcgcgaagcctgatcgaggccacgctccatgtcgatcgccttgccctgcagttcgccgaagcgttgctggttgctcaacgccgcgtcgtcgacctgctcggcacgtaggcggttctcgcccagttgaccggtgagatactcgaaggagtcgcccagatgcgccaccgacgtactgaagcaggccagcttgctggccacgccgcggtagtaagcgagttggcgctgctcatcgctgcgtgccgcctgcatgacggcgagcgcctgctccagcgccgagatacgcgcggcctgatcgtcgcaggtgcgctgcaggcgatcgcgttcgtcttgcaactggcgggcggcccgcctggctccgaagatcatcgtcggcctcgcgaggtcagttgagcgtatagccgttatcgaccacccagtcctgtccgtagacgccgcgagcgccctgcgacagctggaacaggatcacgttggcgaccgccgccgactcgaggaaatgccccggcaggagacgcttggtgaccgcatcggcgaccgcatccagctgttcgtcggccaggcccagggtgccccagatggcggtggcggtcggcccgggcgacaccgtgttgatgcgcacgtccagcgacgcgaattccaccgccagcgtgcgcgcatgggccaccagtgcagccttgctggcgatgtacgcggccaggccagggaaggtgctgcgtgtcagaaaggtaccgacgaagaccaccgaggccggtttggcgagctcggcccgcagcgccgccagggtgttcagcgcgccggcgccgttgaccgcccattgacggtcgaagcagctcgtgtcgaggctgtcgccgagctcggcaattccggcattgggcaccaggtaatccaccggaccgagcacggcggcgcggcgcgccagcgtttgcaggtcgtcggcggcggtaacatcaccggccacccagaccatctgctcgggatagctctccagcaactggcgcagccctccgacgctgcgcgacatggccagcacacgagcaccacgctgcagcagagcggcgcacagcgcgaggccgattccggaactggcacccgtgacgacggccaggcggtccttgaattcgttcttcatatttactccgatgccggcgatcgccgagccacaagcggcccgacccaggatgggcgggcagcggttattcgatcaggggttacaggtaggaacgccgacgaccaccgtcagccgggatgaccgtcgacccgtgcgctcaccagcatcggggcatagcgccaggcgtacagggcgaaggcggcggtccagcagccggccgcgagccagagtccggacatcggccactggctggcgatgaacacccgcgcagccgcgccgaaattgaacagaatgaaggcagcgacgatgcccgacggtagctgcaaggggcgtccggtatggccgagcgtcacgcgcgcgatcatcgccaggatcaggccgctcatcgcacccaccgaaagggcatgcagcgccgcgctggcgttgctcagcaggccgaagttccacagcgccaggcccgccgcagcgattaccagccagagcatggccaggtgcagcgaccacagcagcggcacacgccagatgccggcgtcgtaccaacgcgccaggcgcagcaggtggccagcggcgatagcgatgaacagcaggccgagcagcacatgcggcacgagcgcgacaccggcggcgtaaagcgcggcaatcaggccggtcccgaccagcagcgccacgtccagccagacccagggcttcaccgcatcggtacggccgagaccgcgctgggtaaagaagggaatcacccgcccaccgatgatggccatcagcgccgccaccagccacagcccggcgagtacgccctggcgctgtagtccgtcgtcgctcagcgcgacgccgcagagcaccagcacatcggcgccggtcatcagggtgagcacggcgatgatcgggtagttgcgtttctgcctgaccacccagagcatgtgcgccatcaacccggttacgccgagcaggaacagcaggtccgccaccaccagcaggccgatcggtgcacccagcaaccagcccagacgcgccagcagccagacgcccgccagcgccgccaaccgattgccggaaacaccgggctggcccgtccaggtctgccccgccgtcagcaggaagccggcgacgatggccatggcgaagccgaagagcatttcgtggcggtgccaggcgagccagccgccagtggggtgaaagcccgaccacaatccggtccaggccccgatccacagcggaatcgccagcatcgcgaagaggctgccggcgagaaagaatggacgaaacgcgagccgccagaggggcggaatactgagggcttttcgccgatcgatgacttgcacggggcctcctgacacttattctgcaacggcccgcgaggcagtgagccgccggaccgaggaaccaggcgccgagattttcggagccagggttactttgtacagcgtaggaggcgttcccagacttgattgcaatcagcttttgacgagggggcgttggcaggcgatgacagggctgtcgcagagattcgtagggtggatcgcgcgtcaccgatccaccgagccggctcatggtggatgtaaaaagcgacatccaccctacgctgctctttgtgggaggcgcgacccgcggcgaacggcgccggctcggtgcctgaaaagcttcggcccggggtcgggcctcccacgaaagcagcccgtgcgtggcgccaccccccacaaatcgagcccgtacatggcgctgcgttgtgcaggtcgctcgctttttctgtgggagccgcgaccccgcggcgaatggcgacggctcggtgcccaaaaaacttcgccccgagggcggggctcccacaaatcgagcccgtgcgtggtgccacccccacaaatcgagcccgtacatgccgctacgttgtgcacgtcgcacgcttttcctgtgggagccgcgacccgcggcgaatggcgccaacccggcgcctgaaaaagcttcgccccgagggcgggcctcccacgaaagcaacccgtgcttgacgccaccttatgcaagcggcgcgctttttctgtgggaggcgcgacccgcggcgaatggcgccgcctcggtgcctgaaaagcttcgccccggggacgggcctccacgaaagcaacccgtgcgtggcgccaccttatgcaagtggcgcgctttttttgtgggagccgcgacccgcggcgaatggctccaactcggcgcaggaaaagcctcgccccgaaggcgagcctgctacagcaaaagcacaaaaaacactcgcgtgcgccgagttatttcggctcgtgcttgaccgcgtcggcgccggcgctttccccgtcgctcatggatttacggaagccactgatcgcgccgcccaggtccgagcccagcccgcgcaggcgtttggtgccgaacagcatgaccacgatcagcagcacgatcaggagttgccagatactgatacccatcattgcaatacctcgtttgaagttgtgtcaggtgcggccatgcacaggccgcttgttcaatgaccggcgtgggcctggtggtcgcccatgttcatcggcatggcggccaccggctgcagcaccgactggtcgatctcctcgaagcgcaacacacgcccgccctgctcttcagccaggcgctcggcgtcctcttccttggcgaacgtcgccagcaccgcgcccatggcgcctttcaggtgcgtgccggcgacatagtaggcgctggtcgcgtcgatcaggtagtgatcatcaggttgttcccaggtgctgcgccccatgtcgtgtacatacagcttggcgttcaggttgcgattttctggttgcagccaccagccgagcaattcagccgtcgagcagaacttgcggaccttgcccttttccaccgcctcgcctttcgggccggggaaatcgctgatcgccataccgcagacgtggcattcatcgctggcatggaaggccaccggcgcaagcgcctgtgcgttctcctcaggctcgttgcaggcggccagccccagcagcagtgccgcggcgagcagcaggcgtgacgaacggatatatagcgcattcatggtgacagtttccttctcgtgaatcatgcaagacggcgacggaacacgccgtaggccagtagcagggaagcaccgacccagaacagcaggcagagccacagcacggcgcccgggaccggcaggtcaccgcccagcgaaagcacgcccatggcattgccgccctcgaagccggacaggttgatcaagcgatagatgtcggcgggattgagcaggagcagccagggcagcgcctcgggactgaaacgcccctcgctgaacaccagcagcgccagcaggaccaggtcgaaaaccagcacgaagagaaaccacacccccaacgccagcccggcggcgctggacttctcgccgaccttgctgctcagcacataggccatggccaggaacacccagccgagcagcgtcgaggacaccatgaagcggccgaacgcccagagcagcgtgccgatctcgatatcgtcgaccagcagagcgatggccagcatcgcggcgccaaagccgatcagcacggccagcgcgaggatcagcccgtggccaacgaacttgccgagcaggatctgcccgcgccccagcggataggtcagcagcagcatcagggtgccgccctcgtcctcgccgacgatggcgtcataggccagtagcagcgcgatcagcggcatcaggaaggttgcaaggctcgccaggctggccaccgtggccggaatcgaggtgaagccgagctggccggacgccgccgcgccaagccaggcgatacccaccgccaggactgcgaagagcaggctgatggcgagcagccagcggttgcgcaggccgtcgctgagttccttgcgggcgatgttccagacctggttcatagcgtgccctccgcggcgcggacgtcgccggcgcgctccatgtagtagcggtacaagtcctccagcgagggctggtggatctcgatgtcgtccggctcgccttcgccgagcagctcgcgcagcagcggcagcttgtggccgttgatcgcgctgacctcgacgctgcgttcgcccagcgaccgcgcggagtgcccggccgcgccccagcgctgtagccaggcggcgccgttgtccacgccgctggcccggatgcgagtgggcagccccgcctcgacgcgcagttgcgtcaggctgccgaccgcctgcaagcggcccttggcaaggatcgccgcgcggttgatgtgcgcctcgacgcccggcagcacatgcgagcagaggatgatgctggtaccgcgctggcgcaggcgatcgatcagctggtagagatcgccggtggcgatcgggtccagccccaccgtaggctcgtcgagcagcagcaggcgcggctcgccgagcagcgcctgggccagcccaagccgttggcgcatgcccttggaataggtcttcacccggcgctcggcggcgtgggccaggcccacctgttcgagcagttcatcgacctgtttgagcggcgcgcttttcagccgggcgaaatggcgcagcgtctcgcggccactgagctgcgggtagaaggtcacgttttccggcaggtagccgagctggcggcgcaccgccggatcgttcggtgcgcgccccagtacctcgacccggccttcgctgggcgcgagcaggccgaggatgagcttcatgctggtggtcttgccggcgccgttatggccgaacaggcccagcacctcgccctcggcgagttccaggttcaagtcgtgcagcacggtcatgctgccgtagcgctggttcacgccctggatctgtacggcgctcatggcgtcggctcctgcgttttggctatcaagggttcgatgggcgatttcatcaggggatggctgtcctgcacgccgggggatttgaccaccgggaaggcacgctgcacccagcgcagcacttcgatgctcgggctgttcatcagcaggcgcacctgcgggtagagccacagcaggcggtcgacgttgtcgttgggctcataggccacgtcgcccaggccgtcgtcgttgcggtcccagccgaggtagtcgctccagtagttgccgcgcccgtcgatggaccattcctgggtgcgggtggcgacgtacttgacctgctgctggttgtcgacgaaggcgttgccggcgatgcggttgtcttcggagcctgcggtcaggtggatgcccagcgggctgtgggcgaacaggttgttctcgatcacgtcgaactgcgagttgtagatgaacagcgccttgccttcggcgccggcgatcatgctgtcgccgctggagccgctgcgcacgtcgctgacctggttgtcgcgcagggtcgagtaggtgatgtagttcatcaggatgccgtagttctcgtcctgctcggagcggttgccgatgacagtcagcttgcggctctgcatcagcgcgtaaccggtgcgggtgcggcgggtcaggttgccgatcacccggttgtcgttggaatacatgtagtgcacgccgtagcgcaggtcttcgagcacattgttctcgagcaaattgccgttggaggtatcgatatagatgccgtcacgggtttcgcgcacgtggttgccgatgacccgggcgccctgcacggcgtagaggtgaatgccgttgccgcggtcctgcgagcggatgctcgggtcgccctggatgcgattaccgatcacgctgacgtcgcgagtggagtcgacccagacacccgaacccgggccctgcatgtggttgtcctcgatcaccgcgccgcgcgcctttgggccgatgaacacggcggcgttcaggtcggtgaggttgcggccccagttgcgcagcgtgcagccgtggatgcggacgtccggcgcggtgatggtcagggcattgccctcgccctgcgcgtcgatgaccgcgccgggcgcgcaatggatctgcatcgattcgtcgatgccgaacgagccgttgtattcgcccgccggcaacagccagcggtgctcgccgtccgcctcgagcggcagcgaggtgatgggttgcggagccgcctgagccgcaccgcagaaaagggccagcagcacggctgccagcggttgtagcggtgaaaaggcctgagatctgagcacagcgttgttcctttcagcgtccaggcaggttggttggcgtcctccagcgggtccgggctggatcacgacgctattgcatcgtcgcttgttcgccgcgggtcgcgcctcccaccggtccgcatgtcgccgatacctgtggaaggcccgccctcgggcgaagcttcattaccgctccgcgctccggttcagcagcgcggattacctcaccgacctcaggccggctcgaccagcatgcgaccgaccatttccatgtgcagtgcgtggcagaaccagttgcagtagtaccagtgcacgccgggcttgtcggcggtgaaggtgatcgaggaggtctgctgcgggctgatctccatgctcacaccgtggttggtcatgcagaagccgtgggtcacgtcctcgatctcgtcgatgttggtgatggtcacggtgacttcgtcgccctgcttgacgttgaactcggtcaggccataggtcggcgccgacgacgtcatgtagacgcgcaccttcttgccgtcgcggatgaccttgttgtcggtctcgagggtgacgccgtccttcttggcgcgctctaccgtggccgcgaagaaggcatccttgcggtcccagatcttcctggtcttgatctggtcgcggcgggccaggatgcagtcgtgcggttcggcataggtcgggccgtcgtgaaccagcttcatctcgtcgccggaaatgtcgatcagctggtcgttttccgggtgcagcgggccggtcggcaggaaacggtccttggagaatttgcacagcgccaccagccattggccgtcggcttcgctggtttcggtcagcgaggcatgcaggtgtcccggctggtactgcacgtcgagcttctgcttgatgtagtcgaccttctcgcccttgtaggcacggatcgcatcggccatgttccacttgaccacctggctgtcgatgaacagcgtggtgtaggcgttgccgcggccgtcgaaggtggtgtgcagcgggcccaggcccagctcgggctcggcagcgacggtgtcgcgcgcatccttgagcttgttggcgaacaggtcatcgagcttggcgatctcgatcatggtcacggtgggcgacagcttgccgttggcgatgaagtacttgccgtccggcgaggtgttcacgccgtgcgggttcttcggcaccgggatgtaacgggtgtattccgaaccggcgcggccgtcgaccaccggcaccttggagtcgccgagggtggtgaacttgccggctttgatcgccgcctcgatgcgcgggatgttgtacaccaccacccagtcgcgctcgttgcgcatcatgccgcccagatcggtggccttttccgagttgtagcaggtggaggccgcgtacttgccggtgtagtcggcgtcagtgttgtccaggttgccgtcgacgatgacctggaaggccatttgcatcttctcggcgtcgatgacgttgaacatggtgtaggcgctttcggcctgcaggtcgaaattggtgccgtcattgggatgcggaatgacgaactcggcgttggcgaatacgtacttggtgtgcggcaccttctgcagacgcaggccgtggatggcctggacgttcggcacagtgagcatcgcgtcgcacttcatgatgtccagacggatgcgcgcaacgcggctgttggccttgtcgttgatgaacaggtacttgccgtcgtacttgccgtcggtcatggagatgtgcgggtggtggcagtcgccgttgaggtacttggcgctctcgcccatgatcgcgcggctttcgttggtcaggccccaaccggtggccgaatcgacgttgaataccgggatgcgcatcagctcgcgcatcgagggcacgcccagcacccgcacctcgccctggtgaccgccgctccagaagccgtagtagtcatccagctcgccgggcgcgacgtggatcttggatttcgactccttgaccgcagccgcccaggtctcgcggctcatcacgccaccggccagcgccgtggccgctaccgccgcgccggtcatggcgctggccccgaggaagccgcggcgactgaggccgctcttctccagcgcctgggggttcttggtttctttgtcgctcatgtgattgctccttaggggactgcgtcaggtcaaacgatcggttgcgagctcgcgcgctcgggcgcatcgctctgggggtccatcacttgcactacgggaatcaaggtcgggccggcaggggccttcttgccgcgcttgctgcgcttgttcttcaggatcagcggcgggcacttgttttcgttgtggtacgtcatctggcaatcgaggcagtagtggcactcgttggcattgatgtggccgtccggatggatcgcctggatctcgcattccttggcgcacagctggcaggggttgccgcactccttgcggcgcttgagccagtcgaacaaacggaacttggtcgggatcgccagcgccgcgcccagcgggcagatgtagcggcagtacaccttgcgggtgaagatgttgatcaccagcagtgccacggcataggcgacgaaccaccactggcgatcgaaatgcagggtgatggcggtcttgaacggctccacctcggcggctttttccgccagcatcatcgactccagcgagatgccgaacagcaccagcagcacgatgtatttgatcgcccagagccgctcatgcacggcgaacggcagctcgtattgcgggatcttcagcttgcgcgcggcctcgttgatcagctcctgcaacgcgccgaaggggcacagccagccgcagaacacgccacggccccagagcaggatgctggcggcggtgaaggtccagagaatgaagatcaccgggtcggtgaggaacagctcccaacggaagtcctgaaacagcgcatggacgaaggtcagcgcgttgaccaccgacagttggcccagcgcgtaccagccgatgaacaccacggtaaacaccagatagccgcggcgcagccagtgcatgaagcgcggccgacgggtaaaggtgtcctgcaggaagaggatgaccgtcagcagcgccagggccgccactatcacactgatctggaagctcttctggtaccagatgttgacccacatcggccggctggcttcttcggccgcggccagttcctcggcgctcggctgcgggcgctcgagataggtttcgggcatctggtacggcagctcgaagctggtgaacacgccactgatcgggccggtctggcggcgcaccagcagctccagcgtccagggcgaacccggatcgaaggccacgtgttcgcggacgatgaagatggccatctcgccgaagtgcgggatgccctcggcgtagacgtcgtccagacgctggaagtcgcggtcgtggaagctgatgacgttgccgaactggcgcagctgcacgcgatcgaagatgccgccacgcacgtagcccgagcccttgaacgagtagtcgccgctggccatgacggcgaccgcgtgctcgcccggcttcaggccgtccaacagggtctggtactggctctcgccgagcaggttgcggccgatggtcggcgggttgacctcggcggcatagaggtcgatgaaggtgtcgtcggcggcctccggagcggcttcgtcgatgccttcggcctcggtgcccttgaacgcctggtcgatttcgccgcgggtcaggtgcaggcggcggatcgcgccgttgccggtcagctcgctccagctggccggctggaaaacgtcctcgcggatcgtggccggcttctgcgcggcgccgcccttgtcttccaccagcccgagcgacaccgcgacatcgtgggcggcgcgcatgacgatctcgttgaccaccatcaccgtcaccgtggcgccggtgacggcatcgatggtcacggccttctcgtcgctggaatggccgaccacgacccgctggtcgacgctgatgcccttgtacttggcggtgaaggcgtggagtttctcgaccggaatgccgaccagcaggatcggctcatgatgctcgagcacgtaagcgtcgacgatcacgcccttggggtcgagcagcacctgaatattgatcggcttgccggaataggccgggatgtccaccacgttgatgctctggaaggcgtagccgagcacctcgtcacccttggcgatggtgcggacctggtactcgccttcggcggcagagaccttggcgcctgggaagaactgctcgatgcgctgctgttcggcttcgtactcgcgcgcctcgagcggggcggcgcccagcagcagtgccagcagcaggacaaagcccaacctccaggcacgtctggcgccaactgcgagagaaagacgggacttcatggcctacccacttcacttatcgaatgtgaggcgatagtagggagcgccccctgtgctctccttgactcgaatcaagcttgcccgggatccctgattgcattgagccatgtcaacatgaggcccctttgccagcgaccattgacgagtgggatcggtcttgaccgcgagtcgttcggcgtttggaggtatcgcaggccgtctcggtaatagccggcgccccgtcgtgcgtgtggatcaaaagcttcgcggtcgagaccgctcccacgggcgcgcatttgacgtgtgggagcggtattgaccgcgagttgttcggcgtctggaggtatcgcaggctgtctcggtaatagcccggtgctccattgtgggttttggatcaaaagcttcgcggtcgagaccgctcccacggggcgtgcattgacgtgtgggagcggtcttgaccacgagttgttcggcgccggtaggtatcgcaggctgtctcggtaatagcccggtgctccattgtgggttttggatcaaaagcttcgcggtcgagatcgctcccacggggcgtgcatttgacgtgtgggagcggtcttgaccgcgagttgttcggcgtctggaggtatcgcaagccgtctcggtaataccggcgcccgtcgtgcttgtagtcaaaagcttcgcggtcgagaccgctcccacggcgcgtgcatgtgaacgccgccccattgtgggaggcgcgacccgcggcgaatgcaggctgcaagcctgcccgctcctaaaagcttcgcgccgagggcgggcctccttataaaaactgcaggctcctgaagcctgaagcctgcagcctgcagcccttaagcccacctcaaacccgacaacgactcgagggtgtcaggtaggcggcggtcgcgccgcgatgggcctcgctggccttgatttccatcctggcgatgctgcgcaggtgcacctggtccgggccgtcggcgaagcgcagggcgcggccgccagtccacatgtcagccagcggcgtatcgggcgtcaggcccatggcgccgtagacctgcatggcgcggtcgaccacggcggtctgcatgcgcggtaccagcgccttgatcatggcgatttccttacgcgccgccttcgcgccgacttcgtcgatcatccaggcggtcttgagcaccagcaggcgcgcctgttcgatctcgatacgcgactcggcgatccagtcgctgatgttcgaatactgctgcaagtatttgccgaacgccttgcgctcctggcagcgctcgaccatcagctccagtgccaactcggccatgccgatcgaacgcatgcagtggtggatgcgccctggtccgagccgtgcctgggccatcatgaagccgtcgccctcctcgcccagcagattgccaaccggcacccgcacgtcacgcagcagcagctcgcaatggccttccggcgcgaggtggttcatcaccggaatattgcgtacccgctccacgcccggcgtgtcgaagggcaccaggatcatgctctgttgccggtggctgtcggcgtccgggtcggtcttgcccatcacgatcagcaacttgcagttggggtgcgaggcgttggtgatgaaccatttgcggccgttgatcacgtagtcgtcgccatcgcggcggatcaacgtctggatgttggtggcatcggaggacggcacgtccggctcggtcatagcgaaggccgaacggatctcgccttcgagcaatggcttgagccagcgctcgcgctgcgccggcgtggcgaacaggtgcagcagctccatattgccggtgtccggcgcgttgcagttgaacacctcggaggcccagtgcacgcggcccatgatctccgccagcggcgcgtattcgaggttgctcagccccatgcccggttcgtccttgcccagcgagggcaggaacaggttccacaaaccctccgagcgcgccagcgccttcagatcctccatgaacgacaccgggtaggccccggcggcgacctccatttgccacgcgccgacccgcggcacgatgtactcatccatgaaggcacgcagctgttggcgcagcgcttcgacacgtgggctgtaggcgaaatgcattggatacctcggcgatctggcgggtctggatgcaggcaccataggcgccgtgcagccgaaaaagaacgagcctaaagcggctgaatctgccttcaatcacgtcgatcgatagcgcacgaggattgaccgaagtcatcgtcacccaggtgtcgatgcagtagagacgcgcccggcaggcgcgaggcccacggggcagctgacggcagccccccgactaccagtgcaggtagaacatgcccttggccagcaacacgatgccgatcatctgggcgaagatcgcccagtggatacgccgatagcgcaccggcgtcatgcgcccgctgcgcagcaacagggcgaccaggccgaaggtgaagaacacgccgattgccagcaggatcttcagtgacagcagcgtcgcgaaactgctggagaaagggtcggccagcgaatggcggtgataccaggccaggccgatgccggcgccgtagacgaacagcaccacccagtgcagcaccactcgcaggcgggcaccaatggccttgtccaccgtctgcatcagcgacggctcgatctgctggcgaacgcgaccgagcaccgccacctcgacgaacaacgtcccgatgaagaagatggccgccaacagatggatagtgtggaccagggaatagctcatcagccgctccttcgttaatcgatgccggccagcctggcaagctgccggcaaccctgctcagcgagtctgcgcgctcaggttgtcgccgtcacgccgcacctgctgcccggcggcgaaaccgccgtccgagctacgcaccctggcgcgggtaccgtcctcggcctggacgacatagagcgtttgatcgaggcccgtcgcctgctgaacgccctgcccggcgaaatagcccagaccaccgcccaccagggcgccaataggcccaccggccgccgcacccagcatgaacccactgagtccaccgaaaccgccgccgacaacgcggtccgtacgcgccgataccacctcgtcggcccccgccagcgagctggccagcagggttgcacagctaaccatagcgactagattcttcatgcgatgctccttcggatgttgtgtcgtttccttgatcacaatcacgaagcgtgccgcttttaaattctttatttatcaaagaattaagccattaacagtatttaatacccttacctcaaaggtatttacaaccttggtacgagtatttttaaccctaaccatcagcgatagttcaccaccactggagctcgaccgatgatccgttgcaaacgcgcctacgagcccgcggaacccggcgacggttaccgtgtgctggtcgatcggctctggccgcgcaacctgcgcaaggacgctctggcgctggacgactggcgcaaggagctcgcgccctcgaccgagctgcggcgcgccttcaagaccggggaaacgacgttcgaggcttttcgggacagctaccggcgggagctggcgggccacccggaacactggtggccactgctggacgttgcgaaccgagggtcgctgacgctggtctacgcggcccgtgacgaacagcagaacaacgcacaggtcctggcccagtggctggaagatgaactggagcggcgcggcgagcccagctcaccgacctgctatgccggcgaacggatggcctgagatttcgagcgcgcgcatgattgcccgcgcggtagcggctgtcgatgcagcgaacgacacgcgactgcctgccagcgacgcgcttcattgcgtgccgacgccgggcgccgcagctatggttcaatgcgccgacagagtgccgtcaggaggcccgaatgcaggtcgagctgctcgaaatacgcgaccatctgagtcgcttcgcccccttcgacgggctgccggacgacaccctcgacgaaatcgcccgacaggtcgaggtcggctatttcaaggccggcagcgacatcctccgctatggcgaaccgatcgaggacctgcactacatccgcagcggcgcggtggagatataccggcgtaacggcgagctgtacaaccgcctgtccgagggcgaggtgttcggccagttcggcctgctgcgcggccacaaggtgcgcctgccggcacgggcgatcgaagacagcctgatctatttcattcccggccagctgttcgaacaattgtgcgaagccaatgatgccttcgccgacttcgtcgaggccgagggccagtcgcgcctgaaggtggaggaacctcagggcaaggccagcgagctgatgaagatcaaggtgcgcaagctggtcacccggcgcaccgtcagcgtgccgctgggcaccagcgtgcaacaggccgctcaggtgatgaccgagcatggcgtctcgtcgctggtgattctcggcccgccgccgaacgcggccgaggcatccggcatccaggtcatgaccggcatcaccaccgaccgcgacctgcgcacgcgggtattggccgaaggcctgccgcttgatacgccggtcgaccgggtgatgtcacccaacccgatcaccatccaggcggatgattcggtgttcgaggccatgctgagcatgctgcgtcacaacatccaccatttgccggtcatgcatcgccagcgtccggtgggcgtgatcaacctgtcggacatcatcaagtacgagtcgcagagcagcctgtacctggtcaacagcatcttcaacaagcaatcggtggccgagctgcaagccctgctgccggacctgcgcgcgaccttcctgcgcatggtcaacgaagaggccacggcgcacatgatcggcagcgccatgtcgggcatcgggcgcagcctgacccatcgcctgctggagctggccgaacaacggctcggaccgccaccggtgccctattgctacatggttctggggtccatggcccgtgatgagcagctgatcgtcaccgaccaggacaacgccctggtgatcgacaaccgcttcgatccgcgcatccacgacgagtacttcctgcaactggcgagcttcgtcagcgacggcctggccgcctgtggctacagctattgcaaaggcggaatcatggccagcaacccccggtggcgccaaccgttgcgggtatggagaagctatttcacccagtggatcgagcagccgaacccggaaaccctgctcaacagctccatcttcttcgacctcagcagcgcctacggcgaggccgggctggtcgaaaacctcaaggacctgatcgcacagaaggccagcagcaacccgctgtttctcgccagcatggcccgcaacgcgctcaaccgcacgccaccgctgggcttcttccgtaccttcgtgatggaaaaggacggccagcagaacaacatcatcaacctcaagggccgaggcaccgcaccgcttaccgacctgattcgcgtgcatgccctggcctgtggctccaaggcgcagaattcactggagcgcctggacgcgatcgccgccaccaagctgctgaccgaggacgccatcacccagttgcgcaatgccctggaattcctctcgatcgtacgcattcgccaccaggccatggacttgctggaaggtcgcgaaccggacaactacatcgagccggaaaaggtttccgccaacgagcggcacaatctcaagtcggccttccaggtactgagcaacgcgcagcagttcctgcgcttccgctacccaggccaggtccagagccgcccgctatgaagcgtaacggacgcacgccagcccccgattggcccagcctgttcgccgaactcgcgcagacggcccgcgacccacgcctggcgcgcttctaccaggccggcacggtgagcgccgatacgccgctggatcaagcgccgctgctggccctggacgtcgaaaccaccggcctggacagccagcgcgattcgatcgtcagcctcggcctggtgcccttcgacctgcgccgcatccgctgccgtgagtccagctactgggtggtcaaacccgtctgcgaattgagcagccaatcggtcaccttccaccacatcacccactcggacgtcagcgacgcgccaagactggccaccgtgctcgacgagctgctcaccatgatggccggcaagatcatggttgtgcattaccgcaacatcgagcggggttttctcgaccaggcgatgcgccacctgctgggcgaggggctgcaattccccgtgatcgacaccatgcagctggaagcccgcctacatccgcgtcggcgccgccacggctggctgcgtcacctcctgaacaagcagcggccggtatcgatccgcctggccgacagccgcctgcgctacggcttgccgctgtaccaggcacaccatgcgctgaccgatgccgtggccaccgccgagctgttgcaggcacaagccgccacgcactacccgccctcgacgccggttggcgaactctggaactaaaaaaagcgcgaccaccaaggccgcgctttcgtttggatctacaccccgttgcacgcctgcgcggcgtgcaacgggtaacgcgctacctagcgcggctcactcatcaaacccttgacgatggccacacaccccaccagcagcacgacggtgaatggcagccccgtcgacacggccatggcctgcaatgcaaccaggccaccgccgagcagcagggaaatggccacagcgccctgaagaatggcccagaacgcccgctgaggcaccggcgcgttgaccttgccgccggcggtgatggtgtcgatgaccagcgagccggagtccgaagaggtgacgaagaacaccaccaccagcaggatgcccacgaaggagctgatttcggtccatggcaactggccgagcatggcgaacagcttcaactccagcgcggcatcctgcaccccggtgaacccgtccgtgacgaactggccgagggcggtgccaccgaatgcggtcatccacagcaccgagaccagcgaaggaaccagcaataccgcagtcagaaattcacgcacggtacggccgcggctgacgcgagcgatgaacatgccgacgaagggcgaccagctgatccaccacgcccaatagaacgcggtccagccctggctgaagttcacatcggcacgcccgatcgggttggacagcgccggcaggtaagccaggtaactgccgaggttgctgaagaaaccagtgacgatggccagggtcggtccggcgatgatgatgaacagcaacaacagcagcgccagcaccatgttgaactcggacaagcgcttgacccccttgtccaggcccgccagcacggacatcagcgcgattaccgtgataccgatcaccaggagcaccttgctggtatcggtattgggcatgccgaacaggaattcgagacctgcggccgcttgctgggcgcccaggcccaacgaggttgccagaccgaacagcgtcgcgaacaccgcgaggatatcgacgatatgaccgggccaaccccagacccgctcacccagcagcggatagaagatcgagcggatgctcagcggcaggcctttgttgaaggagaacagcgccagcgccaacgccacgattgcgtagaccgcccagggatgcaggccccagtggaagatcgtggcggccatgctcaggctggcggcggccttggcatcacccgcagcggcgcccagcggagcccagtcggtacgcacgccattttcgaccgcggtaccccccagcgccgtggagaaatgcgacatgggctcggccacgccgtagaacatcagaccgatgcccatgccggcggcgaacagcatggagaaccagcccgtgtaggaatagtcaggggtcgcctccctgccacccaggcgcacccggcccagcggcgaaacgatcaaacccaggcacagcaggacgaaaatattcgccgagccgatgaagaaccaggccagcttgctggtcagccagtcgcgaagcgcggtgaacatcggctcgacatcggcgcgcagagccagcgtaacgaccacgaacagcacgatggtcagcgcagagatgatgaacaccttgccgtgcacatcgaaaaacttgcgtgtgatgttgtcctgaccgatgacgtagtcggtatcgatcaggttggccgccccggtcggggcgggaatactctccacggccgaggccgcgttctttccagggttagtcgccacctgctgttctccttattcttggttggcacgttcgaaacacgagcgcagggacgcgcacgccctttgctgcacaggtcgattagacctgttcgaaaatgctagcagtcatggaactaacgcctagcgaccgagaccggcatcgaccatctcagaaccgtcatttgccagccacagggcttgccgtcgccccacctgatcaggtaacggcgctgatcgcctggcgccacggaaatgccgcagctcggcgacgccgccgacacaggaaggaacagtaagcaagtcagccggaagcccgtagcgagcagcaggacgttggagggatgcggcgtgggaaggaaaagttggcgcgcgtagcgagcccctcaccgagcggcgatcgccggcgaggggagactcttgaaatcagtgcttgcgattgacggtcaacgctgcgcgaatcacgtcggcgccgatatcggcttcgtagcgttgccataccggcatcattttttcccgccaggcctggcgctgttccggcgtcaggctgatcagcttgctgctgccgctggcgaggatgcgatcgcggtcgcgctggttgagcgccgcggcttccttgttcactgcctgggtcacttcgagcacgatgccttcgagttccgagcgcaccgcgaagggcatgctcatccagaacttcgagctggtcaccagcatgtaattgagcaccccgtggttgctttcggtgatgaacggctggaccgtgtgcatgttctggctggcaatgttcgaccaagggttctcggcgccctgcaccacaccgtccttcagcgacttgtacacatcggcgaagggcaacaccaccggcttggctcccaccgcctcgaactgcgcttcgagcaccgccgacggctggatgcggaacgccagccccgcggcgtcttcgggcgtccgcagcgcccgggtggccgagagctgcttgaggccgttgttccagtaggccaggccatagatgccggaatcggccatggagcgcagcagctcacggctcatctcgcgcttctggaaacgctgcacggcgtcctggtcgtcgaacaggaacggcagatcgaagacttgaagtttgcgcgtgtacttgccgaacttggatagcgatggcgccagcatctgcacccgaccatcgagcagtgcctgcatttcatcggcatcgccgaccagcgtcgagttcggatagacctccaccttgaccttgccggccaggcgctcatggacgagcttctggaacagcaaggcacccttgcccttgggcgtgtcatccgccaccacgtgggcgaacttgatgacgaagggctcaccttcggccgcgttagccggagcagtcaacccacacagcgccgcgaccagcacggcaacacaagacttgaacatctgacccccaacgggaaaagctcggacccggcgccttgtgagcaccgttcgagtgatttaacgattgcgataggttcgactcgcgcgaccgcgcggcggatacaggtcgaacgtgagtagcccgctcatcacggcgacggagcgccagcggcgggcctttattggtatgcggaacgtgaaataccgatgctagagcggtaccgcacgaagcgggaagtcttcgtcatcagcgcaaccgacacaagcacgagaagtccaaccagctcgcaaaaacagcaggttgcgttgatcggaagaatagaacttcacgccgcgcgccatttctattggcaacacgcacccattgaccgatgccatgaacgcaccttcgcccaatcccgattccaacccggtcgactgcctgatcgtgggcggcggcccagccggcctgaccgcggcgctgtacctcggccgcttccatcgcagttgcctggtggtggacgccggctgcagccgtgcctcgtggataccgcgttcgcgcaattatccgggcttcccgccggggataaacggcaacgatctgctggtccggttgcgcgagcaggccagcggctatggcgcccggctcgagcacggccgggtggaatggatcgagccccatgccgacggattcagcgtccgctatggcgagcgaacctgcatagcccgtcgcatcatcctcgccaccggcatcgaagacaccctgccggacatgccggatgtcgagcaggcgatcggtgaaggcaaggtgcgcctgtgcgccatctgcgacggttacgaggtcgatggcgacaacgtcgcggtgtatggcgaagcggaaaacgccatcggccacgcggtgttcctgcgcaccttcagcgaccgcgtgacggtggtggtgcacggcgagccggacgcctgcgaccaggccatcgccctggccgagcactacggcatccaggtcatcagtgaccgggtcgaatcgctgcacccgtgcgacaccggtatcgagctgctgacctgcggcggcgaccggcaccacttcgacatcatctaccccaacctcggggcgcgctttcgctccgacctggcgcttcagctgggcgtgccctgcgacgagtgcggtggcgtgccggtggacgaccatttgcagacctcggtgcgcggcctctatgcgatcggtgacgtgaccctggggctgaagcagatcagcgtcgccatcggccaggccgcgcaggccgccaccgccgtgcacaacagcctggaatccaatccctggggcggctcggcgcgcaatcgctgagtgcagcttttgcatgacgggcggcggtattcacccctgcacgcctccgcgcgggtctaggctttatggaggcccaaccattgcggagcattccccatgtccctcagcgttttcgacctgttcaagatcggcatcggtccgtccagttcgcacacggtggggccgatgcgcgcagcactgcggtttgccgaggggctgcgcgatgaccagctgctcgatgccaccgagcgcgtccgagtcgagctttacggctccctcggggcgaccggcaagggccacggcagcgacaaggcagtgattctcgggcttgaaggcgaactcccggaaacagtcgataccggcaacattccccagcgcatggccgccatcagggagtcgcacgagctgcgtctgctgggcgagaagctcattcgcttcgaagtcagcaacgacctgcagttcattcgcaagccgctggcgtaccaccccaacggcatgatcctgcgcgccttcgatgcgtccgggctgcagctgcgcagccgtgagtattactcggtcggcggtggcttcgtcgtcgacgaacaggcagccggtagcgaccgcatcgtcgaagaccgtacacccctgccctaccccttccgcagcgccagcgagctactggcgctgtgcagcgagcatgggctgtcgatcagcgaactgatgctggccaacgaggccgcgtggcgccccgaagccgagacccgtgccgggctgttgaaaatctggcaagtcatgcaggagtgcgtcaaggccggctgccgcaccgagggcgtgatgcccggcgggctcaaggtgcaacgacgcgcggcggggctctaccgtcagctcagcgagcacccggaagccagcctgcgcgattcgctcagcgtgctggactgggtcgacctctatgcattggcggtcaacgaggagaacgccgccggcggtcgcgtggtcaccgcaccgaccaacggcgcagcgggaatcatcccggcgctgctgcactactacgtacgcttcatccgcggcgccaacgaggacggcgtggtgcgctttctgctcacggcggcggcgatcggcatcctgtacaaggagaacgcctccatttccggcgccgaggtcggttgccagggcgaggtcggcgtcgcttgctcgatgggcgccggtgcgctctgcgaagtgctgggcggcacgccgcagcaggtggaaaacgcggccgagatcggcatggagcacaacctcgggctcacctgcgatccggttggcgggctggtgcaggtcccctgcatcgagcgcaacgccatgggtgcggtcaaggcgatcaatgccgcacgcatggcgctgcggggtgacggtagccacttcatatcgctggacaaggtgatccgcacgatgcgccagaccggcgccgacatgaaaagcaagtacaaggaaaccgcccgcggcggcctggcggtgaacatcatcgagtgctgaaccaccggccgccaaaacgcagcgctgctagccggcagtaatcgaccctgcaaaaccgtatcatccgttcggcggcgccatggccgcgccctgaatttccctacctgccttgctgtctccctcttgttgccgaccgggaacgttccaataaaacgccgaggaatagatgaccacccgctccgagccatccacacccaagaacatgccactgacccgaagcacgctggagtttccggtggtcggcattggcgcctcggcgggcgggattcaggcccttctggccttcttcgagcatatgccgaacgactgcggcatggcgttcgtggtgatcatgcacctgtcgcccaagcatgagagcaacgtcgacaagatcattcagaacgtcaccaggatgccggtcctgcaggtcacccaacccgtcgcgatcgaacgcaaccgcatctatgtgattccgccggcactcgacctgtcgatgaacgacggttacctgcgcctgcagaaacctgagcgcgagcgcggcccgcaggtggccatcgacctgttcttccgcgcattggcggacgtgcaccacagccatgcggttgggatcgtgctgtccggcaccggtgccgacggctcggtcggcctgtcgcgcatcaaggaacagggcggcatcaccctggcgcagacgccggaagatgcccagtacgattcgatgccggccagcgccatcgagaccgggatggtcgacatcgtgctgcctgcggccgagatgccgcagcgcctggtggagctgtcagagaatcttcaggccttgctcgcccggaaggatccgctgccacccctgagtgagatcgagcagcaggacgggcccgatggcgaacaggaatccgcgcaggcacacgcgcagtcgaagcccaacgagctggcactgcgcgagattctcgcggcgctacgcgcccgcaccggccacgacttccgccactacaagcaagccacggtattgcggcgcatcgagcggcgcatgcaagtcaacgcgctgcgtgacatgcccagctatgcccgccacctgcagagccatccggaagaaacacccgccctgctggccgacatgctcatcggcgtgaccaacttctttcgtgaccgcgaggcgttcgaggcgctggagcgcgacatcatccccgccttgttcgaacagaagctgaacactggagacaaggcgttgcgcgcctggtcagccgcctgttcgaccggcgaagaggcctactcgctgggcatgctgctggtcgatcaggcggcggccagcagcgcctacagcgaaatacagctgcagctctttgccaccgatatcgatgatcgcgccctggaaaccgctcgcaccggcatctaccccgaagccatcgtcaccgacgtgccgcctacgcggctgcgccagcatttctacaaggaacagaaccattaccgcatgcagaaagagctgcgcgagcggattctgtttgcccggcacaacatcctgcgcgacccgccgttctcgcggctggacctgatatcctgccgcaacctgatgatctacctggaccgggacatccagatcgaagtgctgcgcatgttccatttcgcgctcaaccccggcggctacctgttcctaggcagctcggaaacggccgatgcctgcagccagtatttcaccccggtggacaagaagaaccgcatctaccgagccaaggaagtcggtgcctccctgcgccgccccccgaccggggcgctgcacggcttcgcgctttcgacgccgccccgcccctcggtcaacgagccctatcgacgcagcaaaaagttctcctttgccgacgtgcaccagcgcgccctcgagcagtacgccccgcccagcgtgatcgtcaatcacgaagccgaaatcgtgcatatgtccgacaaggccgggagcttcctgcgttatgtcggcggcgaaccctcgctgaacctgaccaccctgatccatccgcagctgcgcctcgagctgcgcaccgcgctgtaccaggccacccatactggcaaaagcgtcgaggcgcggcgggtgcggctggagcgcgacggtcgccacttctacgtcaacatggtggttcggccgttccgcgacaacgaggctggcagcgagtacatgctggtgctcttcgatgaagtcgaagcctgcatggacaacaacacgctggagcatcccgataccaaggacagcgtcctgacccagctcgaggcggagttgcagcagaccaaggaacagctgcaggtcaccatggagcattcggaaacctccaccgaagagctgcgcgcctccaacgaagagctgcaggccatcaatgaagaactgcgttcggccaccgaagaactggagaccagcaaggaagagctgcagtcgatcaacgaagagctgaccacggtcaacttcgagctcaagaccaaggtcgacgaaaccagcaagatcaacgacgacctgcagaaccttatctcctcgacagacatcgccacgctgttcgtcgaccgcaagatgcgcatcaagtggttcaccccgcgagcacgcgacatcttcaacgtgatcggcaacgacgccggtcggtcattgctcgatatcactcaccgcctcaactatccgatgcttcaccaggatgctgccgaggcgttcagcgagctgcacctggtcgagcgtgaggtccacaaccgcgagaacgatcgctggtatctggcgcgcttcctgccttatcgcaccctggacgaccgcatccagggcgccgtgctgaccttcatcgacatcaccgagaggcgtcacgccgaagcgcaactcgaggccgggcaggcgcacctgcgcctgctggcacagagcaccaagggctacgcgatcatcacgctcgactgcgacgggctgatcaccacctggaatcgaggcgccgagatcatcttcggctacaaggaaaaagaggtgataggccattgcatcgacatgatctacaccgaggaggaccgcagcgccggcgtcccaacggcggagcgcaaacgcgccctggaacacggacaggcctccgatgagcgctggcacctgcgccgggacggctcgagatgcttcttcagcggcctggtcaacccgctggtggatcacgacggcagcgtgatcggcttcgccaagatcgcccgcgacctcaccgaggagcgacagcagaactccaatcagcagagcgaactggaaagcatccaggccgccaatttgcagaaggaccagttcttcgcggtcctctcgcacgaactcaagcatccgctgaacctgattcaactcaacaccgacctgctggcccgctcccaggcggcgaagaactcgccgagcctgctcaaggcgacccgatcgatccagaatgccgtgcgcagccagtcgcggatcatcgacgacctgatggacgtctcgcgcatccgcaccggtaagctcaagctgcaattttcgacgctgaattaccaggaggtgctgcgcggcatcgaggctgtgttcgcgccgctggcacaggcggaaaacgtgaccttcgatgtgttcaagcccgatcagccgatctatgtccatgccgatccgacccgactggatcagatcatctggaacctcctgaacaacgcgtggaaatttaccaagggtggcgagcgcatctgcatgcagctggaacgcgagggcgaccaggcccggctggacgtgatcgacaccggcgaaggcatatcggcggaattcctgcccagggtgttcgacatgttcggccaggctgagatgcagcatgcgcagcgttccaaacacggactgggcattggcctggcgctggtcaagcagctggtcgaggcgcaccacgggcgcatcgaagccttctccgaaggcatcggccgaggcgcgcggttcagcgtctggctgcccgtgcacctgcaggccgagctggaactcagcgagctgggcagcgacacggcgatcggaggcctggcgggggtccgcatcctgctggtcgacgactcgccggacatcctggaaaccatgtgcgaactgctgcagagcgaaggtgccgaggtcatcaccgctggcggtggcgcccagggcatcgcgctggccgagcagtcgcgcttcgacgtcatcgtctccgacgtcggcatgccggagatcgacggccacaagatgatgacggcgatccgcgaaggcaatgccaatgccgacacacccagcatcgccctgaccggctacggcaccctgcgcgacgtggaaaaagccaaggccgcgggctttaccctgcacctgcgcaagcccatcgacctacaggctctgatcgatgccgtgacccaggcggtgcgctaagccgcaggaggccggccttcggggcgaagcttttcaagcaccgagccggcaccattcgccgcgggtcgcgcctcccacagaaaacaccacccagcgcacgacccgccctgtgggagccccgacctcggggcgaagcttttcgggcaccgagttggcgccattcgccacgggtcgcgcctcccatagaaaacagcatccagcgcacgccccgctttgtgggaggcccgacctcggggcgaagcttctccaacatcgagttggcgccattcgccgcgggtcgcgcctcccacaagaaacagcacccagcgcacggcccgctttgtgggaggcacgacccggggcgaagcttttcgggcaccgagctggcgccattcgccgcggggcgcgcctcccacaagaagcaccacccagcgcacgccccgcctttgtaggagccccgacctcggggcgaagcttttcgagcaccgagttggcgccattcgccacgggtcgcgcctcccatagaaaacagcatccagcgcacgccccgctttgtgggaggcccgacctcggggcgaagcttcttcaacatcgagttggcgccattcgccgcgagggcgcgcctcccacaggaaaacagcacccagcgcacgccccgctttgtgggaggcccgacccggggcgaagcttttcaagcaccgagccaacacccttcaccgcgggcgcgcctcgcacagaaaaagcgccctgcttcagaagatgccgactcagctgtccttgccgatcccgtactcgcgcagtttgttggccacggtggtgtgcgaaacaccgaggcgcttgcccagcagacggctgctggggtggcgctgataaagctcctgcagcactgctttttcaaagcggccgacgatctcgtcgagatcgccttccagtgaaaaatcacccaacggccgcggcgtgccatagtccggcaggcgcacgtgctcgggcttgatcagcttgccgtcgcacagcgaaaccgcctggaacagggtgttctccaactgccgcacgttaccgggccagtggtaacccgccagacgctccaacgcctgctcggacaggctcggcagggggcagccgatctgccggctggcctggtcgatgaagtgcaatgccagcggctccagcccgtcgaggcattcgcgcagcggcgggatgtgcagcgacagcacgttgaggcggtgatacaggtcctggcgaaactcacccttggcacagagttcggacaggtccagctgcgtcgcgcagatcacccgcacgtccaggtagacctcctcgtcgctacccacgcgacggaagcagccgtcctggagaaagcgcaccagcttggcctgcaagcgtgtgctcatctcgccgacgccatcgagaaacagggtgccgccggtggtcagctccagcaggccgagcttgccttccgggcgcgcgccttcgaaggcgccgggcccgtagccgaacagttcggtctcggccatggattcgggcaagcccgcacagttgagcgccatgaacggcgactgcccgcgcgggctggacaggtggcaggcgcgcgccagcagctccttgcccgtgccggtttcgccttcgatcagcagcggcgcatccagcggtgccatgcgtcgcgcttcgcggaccaccgcggccatgaccttcgagctctggaagatgctgtcgaagccgcgcagctcctgcttgcgcacgttatagatgcgctcaccgacacggtcggcccggtgcagcgtcaacaccgcaccagcaagggcctcgctgtcatcgtgctccgactgcaagggcgcgatgtcggcgagaaagacgtcgcccttgatcgtcacccgcaaaccgttgatacgcgccttgttcgcccgtaccagctccggcaggtcgaagtcctcggcgtagcgcgacaggctcatgcccggcacctcatccacccgcaccccgagcagctgcgccgcggcgcggttggcggccacgatggcacccgccatgtcgatggacagcaccgggaactccagcgcgccgagcagcgcgttcagctccagcgagtgccgctcgctgggcatcaggccgaccttgcgcacctcgaacacgccttgcagcgcctcgatcttcggccgcagggcctgcagctgcaggttcatcagattgggacaatgcagatagacggcattgccgtgctcgccgccgacttcgccgcgggcgacgttgatgccgtagtcgaccagcagttcgagcatgtcacggaggatgccgacacggttctggcagagaatcttgatacgcatgcaggttgccttcagcgctgtcgctatgatcgatccacgtgccgagacgactttctgcggatcggcgttgattttcgtcaagattatttgacgccttgctagccaggcaaggcgaatatcacgcaaatacagcgcttcgtaatgaattcgttacaacccagtcctgagaacggcgcttctgcatgagccagccgctaggcagcgctcctcccgcgcgatcagatgaggcatccataacaacaaagactcaggcggccgccccgctcaggaggtcagatgaaaaccactcagtacgttgcccgcgagccggacgtgcatggtcacatccactatccggacgctgaacacgcggtctggcagaccttgatcgggcgccagctgaagctgctcgacggccgggcctgccaggaatacctggacggcatcgaacagctggccttgccccccgaccgcatcccgcagctggaagagatcaaccgtgtactgcaagccactacgggctggcaggtcgcgcgagtgcccgcgctgattccctttcagacgtttttcgagctgctggcgagcaagcgctttccagtcgccaccttcatccggacaccccaagagctggattacctgcaggaaccggacatcttccacgagatctttggccactgcccgctactgaccaacccctggttcgccgaattcacccacacctatggccagctcggcctcaaggcgacaaaggaagagcgcgtctatctggcgcgactgtactggatgaccatcgagttcggcctggtggaaaccccggccggacggcgaatctacggcggcggcatcctctcctcgccgaaggaaacgctctacagcctgtccgacgaacccgagcaccaggtgttcgatgtggtcgaagcgatgcgcaccccctatcgcatcgacatcctgcaaccggtgtacttcgtcctgccggagctcaagcggctgttcgacgtggcgcatgaagacatcatggcccacgtccgcaccgccatgcagttgggcctgcaccagccgaagtttccgccgaaggcggcctgactattaccggtactgatatcggcgctggaggcacccgacttggctacgagggctattcgcggtcaagactgggcgtacccgaccgctcccacggtctttgcccgcctcaggggagcggccttggccgcgaagtcttttggcttgtacgaaggcccacccaccgaccacgacgaggcctctcgcaaggtgccggaccgaacccacgcgtggacaagcctgcggcgttgtccgccctacgctgcttaactcttatcaacatcaccacaaggaccaagccatgaccgctctgacccaagcccactgcgaagcctgccgcgccgacgccccgaaggtgtccgatgacgaactggccgaactgatcaagcagatccccgactggaacatcgagacccgcgacggccacatggagctggaaaaggtcttcctgttcaagaacttcaagcatgccctggccttcaccaatgccgtcggcgaaatcgccgaagcggaaggtcaccacccgggcctgctcaccgagtggggcaaggtcaccgtgacctggtggagccactcgatcaagggcctgcaccgcaacgatttcatcatggccgcgcgcaccgacgaggtcgcgaaaaccgccgagggccgcaagtgaagcatttcagcgacattacgcgagtcccgggcgacccgatcctcggcctgctcgatgcctatcgcgccgatccgaatccggccaagctcgacctcggcgtcggcgtctacaaggacgccctgggcctgacgccgattcccaaggcagtcaagctcgccgagcagcggctgatcgagagcgaacagaccaagagctacatcggcggccatggcgacccgctgttcggtgagcagctgcagaggctggtgctgggcgaacgctcgccagcgctagtcgacaaccgtgccggctgcacccagacgccgggtggcaccggcgcgctgcggctggtgggcgagttcatcaccaaatgcctgccggggcgcagcctctggctcagcgacccgacctggccaatccacgaaaccctgttcgccgccgcccggttgaaggtcgagcactatccctacgtcgatgcgcagaaccgcctggacgtgccgggcatgctcgccgcgctggagcggattccggctggcgacgtggtgctgctgcacgcctgctgccacaaccccaccggttacgacctgagccaggacgactggcgccaggtgctggagatcgtccgcaagcgcgagctgctgccgctgttcgatttcgcctatcagggattcggcgacgggctggatgaagacgcctgggccgtccgcctgttcgtcgaggccctgccggaagtgctgatcaccagctcctgctcgaagaacttcggcctgtaccgcgaacgcaccggtgcattgatcgtggtcgccgccgacggcgagtcgctgatcgacgtgcgcagccagttcgcctcggtggcgcgcaacctctggtcgacaccgccgtcccacggtgccgccgtggtggcgaccatcctttccaaccccgagctgcgtcagctctggcagcaggaagtcgccgccaaacgcgagcgcatcgccgggctgcgcacgggcctggtcgaagccctcgcgccgcacggtctggccgagcgcttcgcgcatgtcgcccagcagcgcggaatgttctcctacaccgggctgacggccgagcaggtgctgcgcctgcggcgcgaggattcggtgtatctggtggaaagcggccgggcgaacatcgccgggctcgatgccgcacggctcgaccagttggcggcagccatcgcgcgcgtcgtggcctgacttcaggccagccacgaggcggccatgccgttcagatgaacactccaggcgcgcccgtggcgaatggcgccgactcggtgccagaaaagcttcgccccgggtcgggcctcccacaaaagcaggccgtgcgcgacacgctgcttttgtgggaggcatgcgcgagcgcgtcgtggcctgaccttaagccggccacgaggcggccatgccgttcagatgaacactccaggcgcgcccctggcgaatggcgccggctcggtgccagaaaagcttcgccccgggtcgggcctcccacgaaagcaggccgtgcgcgacacgctgctttgtgcgtggcgtgcgcgagcgcgtcgtggcctgacctcaggccagccacgaggcggccatgccattcagacgaagctgtaggcgcgcccgtggcgaatggcgccggctcggtgccagaaaagcttcgtcccggggcgggcctcccaccaaagcaggccgtgcgcagcgccctacttttgcgtgcttggcatgcgcgaatcagcgtcgccgatctcgacgccacgacggaaacacattacttgtgggagcggtctcgaccgcgaacaacactcggccctccatccatcgaaagaccagacccggctcaatccttcacgccaacgagccccgggccctatcgcgacaaacccagcgccgatggctgggaccagccgctttcgcagatcagctcccatctcgacgccacgaataaaacatcactgtgggagcggtcttgaccgcgaaccggcgctcggcccttcgcaagcggaactcggcttaaccacccctgtcgtagcattgcgccatcatcgattgggtttctggcctaccatacgcctggtcatgcttacgaaacggcgcggtccggtgacgaacgggctccagcctccgccagactagccgctatcttcagcaacaggttccgagtgagttcacccatgattgaaagcaacaccgaaggcaatccagccccaaccgaatacgcctgtcattcggccagcgagcatggtgcctgccccagctgcgccagcggcgaacgtctcggctttcgcttcagctacgcctatcaaccgatcgtggatatcgccgcgcgcgagatcttcgcgcatgaggctctggtacgcggcgtgaacggcgaatccgcgcccaccgtgttggcgcgagtgaccgaagagaaccgcttccgcttcgaccaggcctgccgcgtcaaagccatcaagaccgcggcccggctcgagatgcagagcaagctgtcgatcaatttcatgcccaacgccatctaccgaccggagctgtgcatccgctcgacgctggaggccgcccgcgctcacaacttccccatcgaaaggatcatcttcgaaaccgtcgaaggcgagcgcatcagcgatgccaagtggctgaccgaagtcttccgtgaataccagcgcatcggctttcttacggccatcgacgacttcggcgccggctttgccgggctcaacctgctcgccgacttccagcccgacctgatcaagctggacatggatctgattcgcggtatcgaccagagccgctcgcgccaggccatcgtccgcggcacggtggggatttgcacggagctgggcattcaggtgatcgccgaaggcgtggaaacgccggatgagtgcaaggccttgcgcgacctggggatcagcctcatgcagggctacctgttcagcaaaccgctgttcgagacctgcagccacgccgcttccctggcatggccgagcgaagcggcgagctgagcgaggctcagccagtcttcagcagcttgagcagctcgcgggcggcctcttccgaagatgctgggttctggcccgtgacgaggaggccgtcgacccgcacataggacgcccagtccgggcccttgctgtagtcgccgccaatctccttcagtttgtcttccagcaggaagggcaccacctcggtgagctgcacgccctcctcctcggtattggtgaagccggtcacctgcttgcccttgaccaggtactcgccatccgcgccgcgcacctgaaccagcgccgccggcgcatggcaaaccgccgccaccggcttgcgtgcctgaatgaaggattcgatcagggcgatggacttggcgttaccggtcaggtcccagagcggaccgtggccgccggggtagaacaccgcatcgaagtcctccgccgatacctcgtccagcttgtgggtgttggccaacagcgcctggccctcggcatcgttcttgaagcgcttggtcatctcggtctgggcgtccggcgcatcgcttttcggatccagcggcggctgcccgcccttgggcgaggccagcacgatctcggcgccggcgtccttgaagacgtaatacggcgcggcgaattcttcgagccagaagccggtgggtttgccggtatcgccgagcttgtcgtgggaggtgaggacgatgagtattttcatgagatctcctgtggtcgggtggcccggcggttgcgggccttggttcatctcgaccatgggagtggggaatgggtcaattgcgatggcggcaccgaggccgtcgtcgccccaccacgaacttagcactttgacagtgccgtaccacgtgcttggctagggctgcgcaagaacttttatgatttcgagatcggtgacatagcggttatagagtgggctgaagcaatggtttcgccctgctgggcgactcacttttttcaaacgcgaaaaaagtaagcaaaaacgctttgcccctgcattcgggtctcgctgcgctcgacttccctcattccaacgctgctccgagggtcgccgcgcaagggccatccatggcccttcacggctctcgcggcatccatgccgctcgcccctctacacagcgattccattcggcctgctgaaagcggcgttcggcggtgtctgttgggccgtgcagcgaaacggttgcaaggggttcaagagatcgtagggtgggtaacgcgaagcttacccaccgacttttttcggcaaaattcgataccgactgcagcgtgggttgtggtgaaaatgcttcgcagttttccaccctacgaagccttccggcgattgacgtgctttgttgctgtcgctgttcaaaaacttccagacgactcggtcccgatccccttcaggaggccgagcgtaggtgctgcgcaggggggcgcgaggcatggatgccgagcgaggagcgatgggacagggatgtcccttcgcgacgacccccggagcggcgccggagcgaggggagttttgcgaagcaagccggggacgcctagtccggatgcaggggtggccttctttttggttactttttcttggccactcaagaaaaagtgactcgcccagcagggcgaaaccaaagcatcagccaacccggccaatcgggataaccgcgcgaacccgaaaagctttgcgagcaagactcgatgcccagcccctacggcaatgcaaactcgtaaaaaagggcgccgaagcgccctcttccaaacccgatcgatcagatccgaaaactccccaccaactgcttcaaccgcgccgcctgctgctccagatccccacaagcgcgcaacgtggactgcaggttctccaccccctcctggttgagcgtgttgatctcggtaatgtccatgttcagcgactcgatcaccgacgtctgctcttctgtcgcagtagccaccgactggttcatcgcgtcgatctcgccgatgctctgggtcacgctgcccaagcgctcaccggcctggttggcgatgccaacgctggcctcgctctggcgctggctctcggtcatggtgctgaccgagtcacgcgcgccaacttgcagcttctcgatcatcccgtggatctcctgcgccgaagtctgggtgcgatgcgccaggctgcggacttcatcggccaccacggcaaaaccgcgcccggcttcaccggcacgcgccgcttcgatggccgcgttgagcgccagcaggttggtctgttcggagatgcccttgatcacgtcgaggatctggccgatgccgacggtctggttgttcagcgcttcgatctgcgcgcaggacgcgctgatgttgctcgacagctggcgcatcgcctcgatgttctgctcgacgaccttgcgtccgtcttcggcctgatggctggcgccactggcctgctgcgaagcgtctgcggcgttgcgggcgatctcctgcgcggcggcgccgagctcgttgatcgctgcggcgacactgttggtacggctggcctgctcgtcggagttgagcatcgaggagttggaggccgccagcacgcgttgcgccacttcgttgacctgctctgtcgccgaggacacttcgcgaatggagccgtggatacgctcgacgaagcggttgaaagccttcgccagctcgccgaactcgtcctgcgattgcacggtcaggcggcgcgtcagatcgccctcgccttcggcgatgttggccatggcccggcccatgtcggtcagtgggcgcattagtacgcggatcagcatgcccagcagcccgatgatgaacaccacggcaatcaccgcagcaaccagggccgaggtacggaagctggacagcgccgcgtaggccttttgcttgtccaccgaaataccgacgtaccaggtcaccgacggcaggccggctacggggctgaagctgaggatgcgttgctgaccatccagctcggcctcggtgaagccactggtcagtgacggggtgttcttcggatagagctcggccagggtcttcatcactttgctggagtccggatggaccagcaccttgccgtcgccgctgacgaggaacgcatagcccatgccgtcgaagttcagcgcgttgatgatgtccaccagcaccttgaggctgaggtcgccaccgaccacgcccaggctctgaccaccggccttggccggggtcgccgcggtgatgatcaactcgctggtggccgcatccagatagggctcggtcagcgtggtcttgccggcattgatcgcgtccttgtaccaggggcgctggcgcggatcgtaaccggccggcagctcgaaacgcggatgcacgatgaactcgccatcgctacgccccaggtaggtaaaagcgaaggtagagctgagtgccggctgcttgaccagggcttcgaccgcctcgccggaactgtcgcgggcgatggtctgggcagtgttctcgagcagcaccaggcggccggacagccagttctggatgttatgggcggtcaccttgcccatctcgtccaggtagctctccagcttggcctgaatggcattgcgctgcaggtagtcgttatagagcgtgaacaatgcgaaggtcgcgatcactacgagtgacgcggccagcaggatcttgtggctgaacttgagacggctgggcatgggcgtgtccgtattgatctaggtcaagtcggaggtccttttcctggctaagcgtccttgtgctgatcgttttatcggcttggcgcgatagaccttgagagagccgctggtcggccagggagaagtaaaagccgatcggaaggcggcgaatctggccctgcgcaaaaacggcactccattgctggagtgccgttcagtcagttgtcgcgaggctgttgtagccgctcaggcactacgcccgaccagtgccggccatacccgtggccgcagcccctcgccgaggacggtcagcgcgccgatggcgccagctatccagtaccagcgcaccagtgggtcgaaacccaaccagccgagggcatgcaggaagaccatggtgatcagcaccgggcagacgtagcgcaccatgaacagccagagcgcataacccagcggcggcaggcccagctcatcacgcatgatctcgctgcgcagcacgtagccggcgaagatcacgatgaagatcccacccagcggcatcatccagcgcgacgtcaggtagtccagccaatcgaagaagttcttgcccagcggcgtccagccggccatcaggttgaacgagagcatggccagcaggctgatcaccagcagcaccacgccagaacccacggcggccttgatgcggctgacaccatgtttttcgttcaggtaggccacggtggcttcgatcatcgagatggccgaggtcagcgccgcgatcgacaccatggcgaagaacaaggtgccgaacagcgtgccgaacggcatctgctgaaaggccagcggcaggctcatgaagatcagcccggggcctgcggtcgggtccatgccgttggcgaagatgatcgggaagatcgccaggcccgccagcagtgccaccgcggtgtcggcgatggccaccatgaaggtggtgcgggtgatggactggccgtcggggatataggagccgtaggtgaggatcgccccggaggccaggctgagggtgaagaaggcatggccgagcgccgccagcagcgcttcaccggtgagcttggaggtgtcgaagctgaacaggaaggcgaagccctcgtcgaaaccgccgctggtgaaggcgtaacccacgaggatcaacagcatcacggccagccccggcatcatccagcgcaccgaactctcgatgccctgttgcacgcccttggcgacgatccacaacgtcaacagcgccaccagcacgctccagccaccgagttgccaggggttggcgttatgcgcctcgaacacctgcgccaggctgtcgacggaactggccgtgagcgagccgtcgagcatcttgatcgtataggcgaaggcccaaccggccaccaccacgtagaagcagagaatcaggaagccagcggccatggccatgccgccgacgcccttccacagggcactgctaccgttctcgcgcacggcacggccgatggcatcgatggggctgccgcggccgcggcggccgatggcgatctcggtcatcatcaccggaatgccgatggccaggatgcaggccagatacatcaatacgaaggcaccaccgccgtattggccggtgatgtaggggaatttccagatattgcccaggccgacggccgaaccggtcgcggcgaggataaagccccagcgggagagccagaggtttttgggggtttcacgggtcatgcgtcacctgtttgttgttatctgtgacggaaatcgaacccgtcgcgctcgtgacgcgacggagtggcaaggcggatcgacctttctttcattgagcgtcgggctgcacctccggagctgctttggcaaacgcttcgagggtttcgcactgctcggtcatctgcaaaatgcgtggatacgcactgaggtcacaggaaaaacggcgcgcattgtatacctgcgggaccaggcatgcctccagataaccgggccgtctgccgagtgacagcttgccgtcgaaggcggccaacccctgctcgacaccagccaggccggtagcgatccagtgttttatccattgctgcttggcctcatcctcgacgcccagcgggccactgaggtattgcaggacacgcaggttgttcagtggatgcaggtcgcaggcgatgtgcagcgccaacgaacgtacccgcgcacgatcggccgggtcgtgcggcagcagcgcgggcagcggaaacacctcctccagatactcgaggatcgccaacgattggctgatgcgctcgttgccatcgaccagcagaggcaccagttcctgcgggttgagcgccttgtaatcggccgcatgctgctgaccaccatccttgaccagatgcaccggcagattctcgaaggccaggcccttgaggttgagggcgatacgcacccgataggcggcgctggagcgccagtagccatagagcttgagcgtcggagacgcgttggtctgggtgtcgttcatggcaatccctattgatcgttgatcccgacccccgcggcggtctgcgcagctgggtccagaagctagtgccggctcaccgccgaacgatgggttacgcagcgccggacattggctggtgcttggcgcaccgaggccagcgctgcttcacccatcctgcctgtcgtgcctgttcagaatggatgaagataccgggcgccccgtatgaaccgtcaacgcacctgccctcacgtaccgatcagcggagcttgagccatcacaaaccaccgaggatcgccaaacaagcccaccgccagtgccacagcgctgttcacgcgccgcgctgtggcaggttttctttacagcgcgctacagacgcggtgctccggcgccgaatgcgctccgctgtaacaaaaacctgacaagcagttgcgacaagtcgccgcaccgggacagaccgttgcggcgacggctcagatcaccccgctcagattgagaaacaccagcacgattgccagcggtgtaccaaagcgcagcagcagccaccaggcctggaaaaggccctgctggcggatgccgatcgcgtcgcgtaccgcctcgcgcttcatcacccagccggtgaacagcaccgtggcgagaccgccgagcggcatcagccagttggtggtcaggtagtcgaggctgtcgaagaaggtcttgccgaatagctgatagtcggcccaatggttgaacgagaacacgctacccaggctcagcaaccagagcaccgcgccactgaccaacacagccttgaggcggctcatgccgaagcgctcggtcatccaggcgatgctcggctcgctcagtgagatcgccgaagtcagcgcggcgatcaccagcatgatgaagaacagcccgcccaccagttggcccagcggcatctggccgaaggcgatcggcagggtgacgaagatcagtcccggcccggcgcccggctccagggcattgccgaacaccagcgggaagatcgccaggcccgccaggagcgccacggctgtgtcggccagggctaccagaatcgaggtcttggcgatcgaggtgccctccggcaggtaagagccatagaccatcatcgcgccgcagccgaggctcagcgtgaagaaggcatggcccagggcgatcagcacactggtcgcggtcagcttggagaagtccggcacgaagaggaattccacaccgcgggcgaactcaccgttgagcgcggcgtagccgaccagtagcagcaacagcacgaacaacccgggcatcagaaagcgcagcgagcgctccagaccaccacgcacgccgaaaccgacgatcagcatggtcgccgccagcaccaggctgccgctgacgaccagccgcagcggatcggctagcagcgtgttgaacatcgccccgctggcatccccgctgacgccgttgaagtcgccgatgaagctggccgggacgtaggccagggcccagccggcgaccaccaggtagaagctcagaatcagaaaaccggtcagcccgccgagccagccggccgcgcgccaacgcgtgctggcgccggcctcgcgggccaggcgcgccaccgcgccgtcagggttctgccgaccgcgccggccgatcatcacctcggccatcagcaacgggatgccgatcagcaggatgcagccgagatagaccagcacgaaggcgccgccgccgttctggccggtgatgtaggggaatttccagatattgcccaggccgaccgccgaaccggtggcggccaggaagaacacccagcgcgaggaccagagaccgcgcgccgcgctttgctgagtacgtgcggaggcgccaccgagcgtgccggcgacgaggctgcttttgtctgtcattgcggattcctgcttgttgtttttgtcagggctgtacaacggaaacgccgaatgggagccagggccgcccggtttgcgaccgaatggcgccgggctgcgattgggctgactgcaacgcttccgtcaaaggctcggcagtacggctgggctgccgaagaaaccgagcggcaccagggccgcccggaaagtcgctacgcgtgcagtcgttgctggctcggctgtgccggatcttcaccgacgtgcagccgctcaagtgccagacgatcagcgatgatggaagtcggctcaccgctggccgccgcgcgggtaaagatctcgcgcagggtctcgccgatgcctttgacatgcgcgtcgatctgcgccgcgctgccaccgatgcgctggtagtagacgtcgatgatgccgccggcattgatcgcgtagtccggcgcgtagagatgattgcgacgctgcagctcgacgccgatctcggggctcgccagctggttgttcgccgcgccggcgatcaccggtgcacgcagggtctgcagggtttcggcattgagaatgccgcccatggcacagggcgcgaagacgtccacgtcgaggccaacgatatcgtgcgggcgtacggcgtgggcgccgagctcggtcaccgcctgctgcacgttggcatcgaaaatgtcgcagacccacagctcggcaccggcggccttgaggtgccgggccaggcccataccgacatgcccgacgccctggatggcgaccttcaggccagtcagatcatcccgaccgaggcgttggcgcacggcttcgcgcagaccgacgaacacaccgagcgccgtagagggcgacgggtcgccgctggcgatgctgccgtccagcgtggtacgcggtgtcgcgccgatgacatggcgggtgcgctgggcgaaggcctgcatttccggctcgccggtgccggagtcggccgcggtgatgtagcgtccaccgaggctgtcgacgaaatcgcccatggcgtgcagcagcgcctggctcttgccggtatgcggatcgccgatgattacggccttgccgccaccgagcttgaggccggccagtgaggacttcagcgtcatgccacgagacaggcgcagcacatcgcgcacggcgtcgtcatcgctggcgtaagggaacatccggcaaccacccagcgccgggccgagcgtggtgtcgtggatggcgatgatcgcgcgcagacccgatgccttgtcgtgacagaacaccacctgctcgtggtgatcgaaatcgggatgggtgaaaacggacattgctgattcctctttgttgttctgttcgggcccgatgcatcgggccgtttggagatatgtgttcagttcgcaggggttcttgtatcagcccattcgcggtcaagaccgctcccacaatgcccctgcgagaagccaacccgtgggagcggttggggacgcctagtcttgatcgcgaaaatcccacgcgccccgcggtgctctgccgcgcccctcggggtcaaggtcgctcctacaacactcccgacaaccgcaagacccgtgggagcggtcttgaccgcgaaaaccacgcgccccgctacctctcggacggctaccttcgcggtcgagaccgctcccacaacatgcgcagcgccgtggtgctccggtgccgcgcccctcggggtcaaggtcgcttctacaacgctcccgacatccgcaagacccgtgggagcggttggggacgcctagtcttgaccgcgaatggcttcgccaagctatgccgccggctcgaacagccgcacggtctgcacttcgtcaccacgattgagttgctccttgagcaacttctcctgctggcgagccttggcgatggagcgctccttcaccgggccgtagccacggatcagttccggcagcgcggcgatggccacagcggtgcggtagttggtcggtttgagctgggacaggagctcatccaggttgcgctcgtactcgctgatcagctcgcgctcgacacgccggtcatggccgtagccgaacacgtccaacggcgtcccgcgcaggaatttcagcttcgccagcacgttgaaggcattcagcacccaagggccgagttcgcgcttgcgcggctcgccagtggtcttgtcgcgcttggccagccacgccggtgccaggtggaactgcagcttgtagtcgccttcgaactgggcttcgagctgctggcggaattccggctcgctgtacagccgcgccacctcgtactcgtccttgtaggccagtagcttgaagtagtagcgcgccacggctttcgacagcgccaggtcgtcggcggtatccagcgcccgcacctgctcgaccttgtcgcgataacgcttggcgtaggcggcgttctgatagcgggtaaggaaatccacgcgccagtcgacgatttcttccagggtctggcagatgggctcggccatttcagccgggcgcgcgagcttttccaccacgtcccgctccagcaccgcacgacggccccagcggaacgcctgcaggttcagctcggtggatacgccgttgatggtgatggccttctcgatggcctcggccgacagcggcagcagcccctgctgataggcaaagcccagcaggaacaggttggtggcgatgctgtcgcccagcaggcgggtcgccagccgcgtggcatcgatgaagtgggttttctcggcacccaccgcatcgatcagcgcttcgcgcatggccttgcccggcacctgggcgtcggggttgcgggtgaactcggccgtggccgattcatggctgttgattaccgcatggctgatctggtcattgaggcgggtcagcgaatcgtcaccggccgcgactaccagatcgcagcccagcagcagatcggtttcaccggcggcgatacgcacggcatagatatcgtcctgcttggcggcgatgcggatgtgcgtcaccaccgggccgaatttctgcgccagccctgcctgatcgagcaccgtgcagcctttgccttccagatgcgcggccatgcccagcagggcgccgagcgtggtcacgccgctgccgccgacgcctggaatcagcacgttccaggggcgatcgagggtcggacgctgcggctccggcagttgcgccggatcgaggctggcacccaccgcttccggcttgcgcagcccgccgccgtgcacggtgacaaaactcgggcagaagccttcgacgcaggagaagtccttgttgcaggcgttctgatcgatttcgcgcttgcgccccagctcggtttccagcggcatcacggccaggcagttggacttctcgccacagtcgccgcaaccctcgcatacggccgggttgatgaaggcgcgcttggccgggtcttccagcttgccgcgcttgcgccgacggcgcttctcggtggcgcaggtttggtcatagatgatcaccgagacgcccttgaactcgcgcagttcgcgctgcacggcgtccagatcgcggcggtggtggaagctggtgatcggcgcgaaggtgtcgcgggtcgggtatttgtccggctcgtcgctgaccagggcaatgcgtttaacgccctcgtcggcgatctgccggctgagctggtcgacgcgcagctcgccatcgatgggctggccaccggtcatggccaccgcatcgttgtagagaatcttgaaggtgatgttgacgccggcggctaccgcggcgcgcacggctaggctgccggagtggaaataggtgccatcgccgaggttctggaacatgtgcggcgtttcggtgaacggcgcctgaccgatccagttgacgccctcgccgcccatctgggtgaaggtctcggtgcgccggtccatccactgcaccatgtaatgacaaccgatgccggccgccgcgcggctaccttcgggcaccttggtcgaggtgttgtgcgggcagccggagcagtagtgcggggtacgcacggtgtcgtaatttcgcgcggccagggccttttccttggcggacaagaaggccaggcgggcctggatgctgtcgctggtgtagataggcgcgaggcgcttggcgattacgcaggcgatcatcgccggggtcagctcgcttaggttgggtagcagagaattaccgtgttcatcaaactcgccgactacccttgggcgcttgctgaccggccagttgtagagctgcccggtgagctggtcttcgaggatgctgcgcttttcctcgaccaccagaatctcgtccagcccctgcgcgaactcatgcaccgaaaccggctccagcggccagctcatgcccaccttgagtacgcgcaggcccaccgaggcgcacagcgcttcgtccaggccgaggtcgtccagggcctggcgcacgtcgagataggacttgccggtggtgatgatgcccaggcgcgggttcggcgaatcgagcatcacctggttcaggttgttggcgcgggcaaaggcgcgcgcggcgtagatcttgtacaggttgaggcgtttttcctgcgccagcggcgggtcgggccagcggatatgcacgccgtcttcgggcagttcgaagtcatcggggatgcgcgtcttgacccgcagcggatcgacttccaccacggcggaggagtcgacgttttcggcgatggtcttgagcgccacccagcagccggaatagcgcgacagctcccagccgatgatgccgtagtcgagaatttcctggacgttggcggggttcagcaccgggatcgacgcggcaatgaaggcgtgctcgctctgatgcggcagcgtcgaggatttgcagccatggtcgtcaccggccaacagcaacacgccgccatggggcgaaacgccggccgcattgccatgcttgaagacgtcaccggagcggtcgacgcccgggcccttgccgtaccacatggcgaacacgccgtcatacttggcgccggggaacaggttggtctgctggctgccccacacagccgtcgccgccagttcctcgttgaggcccggctggaaatggatggcgttctgtttgaggaaatcgcgcgcttcccagaggctcttgtccagcatccccagcggcgagccgcggtagccggagatgaagcaaccggtgttcaggttctgagcttggtcacgctgatgctgcagcatcggcaggcgggtcagcgcctgggtgccggtgaggtacagatgtccggttgcgagccggtacttgtcatccaggcggatctcggccagtgacatgtggcgctcctgtttgttgttatcggagtcggggacgtgtttgcacgtcccgcctaatcaagacgagggcagccgcacggaagccgtcccacgtcgggcaatcgacagggggtcaccccaccgttgcgcgttggataagagtctggccgtgacgaggagagattttctttctacttttgcggtgtaagcgcccttgcgtgcatgatccatccactaacaacaacaaatcgggaacaaccatgcagactccgctgagtagcatcgatcgcaagattttaatgctgctgcaacacaacgccgatctttccgccgccgaggtggcggagcgggtggagctgtcgcaatcgccctgctggcggcgcatccaccggatgcaggaagaagggctgatcgagcgcaaggtcgccctgctcaaccccaagaagctcgggctgaacatgacggtgttcgtcaacatcaagctttcagcccacgggcgaagcaacctggacgaattcgagcgcgccgttgtgggttatcccgaagtgctggagtgtcacaccatggctggcgagtcggactacctgctcaaggtggtggccaaggatatcgacagctacgagcgcttcctgcgcgaccagctgttgcagcgcccccacgtgcaagaggcgcattcacacatcgccatgagtgaagtgaagcggaccacggagctgccgctggactagcgtcagctcaggaattggctggcgccccgtccagcagttgcagcaggcgcccgaccgtctcctcgagcggcccggaattgtccagcagctgggcctcctcctgctccgtcgccgagcgaaactgctcgtttcgcgccaggcgtgcctcgatctcggccagcggctcacgcccgcgagccagcaaccgctcgcgcagtactggcagcgccacggtaagcagcagcggacgcagctgtgggtaacgcgcccgtgcctggtccagatagccgcgcgacccattgacgagtacgtcctcccccgccgccagccagtcatcgatctgccgtgggatgccatagcgcaggccgttggcctgccagtccagggcgaatgcgccgctgcgccgcagctgctcgaactcctcggtgctcacggcctgggcatcttcccctgccgcctcggcagaacgggtgatgacgcgccgagcgacccggcaaccgcgcgcctgcaacggctcgcgggcagcttccagcaggctgtccttgccggcccccgaggggcccatcaggtaaaacaggcggcctgtcattgcactactccaatcctgaatcagatggcccaatggccgcccggccgtcgctcatggctgccccgggatgcccgtcaccggatcgccaagtttcagcgcgtgctgctgaaaccacccctggttcacctccagcgcatagcgcgccggttcagcggaacagcggatcgaccggtccaacggctgcaaatcgatgagatcgaccactcgcccggcttcatccatgaacgccgcggacaacggcaacggcgtgtccttcatccacaggcagtgacggcgcacctcatcgaagcgaaacagcatgccgcgatcggcggccagcccggtgcgccccatcaggccgcgctcacgctcggccggcgagcggacgtattcggcgcgcaacggtacgtcgccgacgcgcaagtcgagcagcacgggctcgccggcaagggccaggctgctgaggccggaaagagacagcagcaacagggtacgcatgggctggctcgcaaaaaaatggggtgacgcagcatagcaaggacgggcggctacgcctcctccacgggcacctccggcgtgacgttttcgctgtctccataacgtttctggcagcgctcgcaatagaagctgcggcgcttgctgcgcccgagcgccttggccttgacgaagggaatcttgcagcgtgggcagatcgtcttggtatgcgccaaccagtgcgctttcagcgttccctcgcgcttccactggaggaattcgaagctgtaggtgcgcacctcgcgcgtcaactcgcggagcttggctgccggcagatcgccgatcaaggacagcggatggatacgggtgcgaaacagcacctcgttcttgatgatgttgcccgagccggagaacagcgtctggtcgagcaacgcatcgcaggccagcagccgcggccgggcacgcagttttttcagcgtcgcccggttgtcccaggcatcgctcatgacgtccgcgctccagtcataggcctcatccagcggcccttcgatgaactgcaccgagcagccgtagaagttcagctcaccgttggcgaacccgaggctcaggcgcggcgcggattccttgcgctcgttgatccggtagctgccgaacaagagcagatggatgcgcagggagacgtcatccagctcgatcaggaagtgcttgccccagctgcgaaacgaccgcaccgtttggcccaccagccgcgccttgtccagcttggcactcccctccgcgcgttcgaccgattggccggtgaatgcagagacttcttcacgaagaatgacgatggatggaccttcaggcatggcgatatcgcttcggctgggcgttaaggatatcgacttgggcttgacccaaaggtgcggcgctttgccgtttggcatatgacgccgaacttccagagcagtcgagcgggtgtcggtcccgctcgtccgcagagctgcagaagcgaggggcagaatcaggccgaaagatatccccagacccagatggtgccaccgaagatgatgcctagataacccaggatcaacaccatatagcccatgacgtcacgcagcttcagcttggaaatcgcgagcactggcaacacccagaatggctgaatcatgttcgtccattgatcacctacctggacgcccaacgcagtggctgcgaaggacgcattcagctctcgggcagcctcgatgacgaccggcccttgcaccgcccactggccgccgccggaaggcgcgaggatattgatcaagccgccactgacgaaagaccagatcggcaaggtttcggctgttgagatacgtacgaacaattccgcgaacgagacgaccagtccggatcccacaaggatgcccatgatgccggcgtaaaacgggtactggatgatgatccccgaaacgatcttgaccccctcgcccagcgcggcgaggtaacgggccggagatgcgaataacaggattccgagaaacagaaaaataaaattgaccgtattcagatccagcgaaccgccttcgatgaagtgtaaaccgacgtagaccagaccgagcaggccgatgacgacaccaaccaccttgctgtgattcattcggtcggccagggtcacgtcctgcctgccatccaaactcggctcgaacggtacggcaacggtgcccggatcgatctcgacgatatccttcgcattcttcgggtgcagccaggcgttgaacagcgggagcgtgaataccaccagtgccgaggcgataagcagcggcgcgctgaatatggtctccgacaggggcaccagccccattcgatcctgcagaaaatgcccttcggtagcgatgagcaagggcacgctgccagacagcccgatgccgtaaaccgagaagccggaaaacgctgccgcgattaccagcgggtagtgcagaccccgtacattaagcgccagcttctgtgcaacgatactgccgatcaccaagccgaacccccagttcagccagctaccgatggtgccgaccaacgtggcgaccacgatggcagcgaacggggtctgtacggtagcggcgatgcggtcgagcatgccgtcaacgaagggggtacgggccaggatatagcccgccagcagaatgacggtcatctgcatgctgaacgccagcaagttccagaacccgtcgccccaatagcgggtcgcatcgagcgggctcgccccctcaaccagcacggccaggatcagcgtgagcacggtcaagccgatggctatcaccaacggatcaggcatgtagcgattgactaatcgcgtgaagaaattggctaacgcattcatcgtgttcccctgggtgccatgttcttttagttgaagcccaacggtaggcggacggccgccacgcccgcaattcgataatcgacttaatgttcggttatcgaacaattaaataaacggcgtggttttccaccgaatgtgcacggctcacatcagccggaactccgtactgcgataaagcgttcgattaccgaacatctcggcataggtgaggattgcgctccggaccgtgcgcctcgtacggtctaaggccccgccagtttatggtgctcaacggccggagccgtccaaatgctcttcctcgtgcatatgcaagtgaacatcccccacgaccttgacccggccgacgccgccgcgctgatcgctaaagaaaagacctactcgcaggaactgcagcgcaacggcaagtggcgccatctttggcgcgtggttggccaatacgccaactacagcgtgttcgatgtggccagtaacgacgaactgcaccagatgctcagcgctttgccgctgtatccctacatgaccctggaggtcaccccgctggcccagcatccgtctgcactggctcaaaactgaggtctgcatgccctacctgatcgaaaccttcgacaagcctggccagcaacggctgcggcgcgacacgcgcgacgagcacctgcgctatctcgaggcgaacaaggctctgctgctcgcctgcggcgccaagctcgccgacgacggcaacgacctgggcggcggcctgtatgtggtcgacctcgacacgcgcgacgaagccgaacgctttatcgccgacgacccgttcagtcgcgtccagctcttcgagcgcgtcaccatcacccgctggcgcaaggcctacctcgccggccagtgttttctctgatccgcaaccgcctgggagccgtgcatgagcaaccaacgctggaagcatcgtccggagggttcgaactggggcgactatggcgagaacgatcagctcggcaggctgaacctgatcaccgcagagaaagtactccagggcatcgccgaggtgcgcgacggcaagaccttctgcctcagcctgccactggaccttccgggcggctgcgccctcaatcccaatcgccatcccccggtgttgcgccccacgttgcgtcagggaggcgtcaacttcaatttccacatgggcaacctgcaggccgggcggccggacgtcctgtgcgacgaccttgcgatcctgcatttgcagtactcgacccagtgggacagcctggcgcatgtcggcgcgctgttcgacgtggacggcaacggcgtgcccaagccggtatactacaacggctacgccgccgacgagcatatccgcggcccgcagcacccggacgatgccggcgtgcaggagcgtatgcgcccggaaagcacatcccaggccggcgcgctgggcatcgagcggatggctgaaaccggtgtgcagggccgcgccgcgctgatcgatctgcatgcccacctgggaccggcacggacactggtgggttatgactccttgatgcgcgtactcgaagccgaccgggtcgagatcgaacgcggcgacatcgtctgcctccacaccggcttcgccgacgcgattctggccatgggcggccaacctgatccaaacaccttgaccgacagctgttcggtgctcgatgggcgtgatgagagactgctgcagtggatcactgattgcgagctggcggcgatcgccgccgataactatgccgtcgaggcttatccggccgcggggggcgacgcctgctgcgcggccttgccattgcatcagcattgtctgttcaagctcggcgttcatcttggcgaactctggcaccttggcccgctggcggcttatctgcgtcgccagggccgctatcgtttcttcctgaccgccccgccgctgcggctgccgggcgctgtcggttcaccactgactccagtggcgaccgtctaacttgcctgcgagatttctcatgagcctacctagagtcctgatcacgggcggtgccgccggcattggtgccgccaccgccgagcggtgccgcaaagacggttacgaacccattgtcatcgaccgcgaaggcagtggcatccgcgccgacctgtccgacccggaggccaccgccgaagcgctgcgcgaagccctggccggcggccctatcacccgcctcgtcaacaatgtgggcatggtctgtccggccactgccgaggagcagacgctcgcggacctcgaccgggttatggccctcaacctgcgctgcgccatgcagtgcatgcaggcgctgctcccaggcatgaaggcagcaggcttcggccgcatcgtcaacatggcctcgcgggccgcactgggcaaggaactgcgaaccgcctatgcggcgagcaaggcggcactgatcggcatgactcgtgtctgggcgctggaactgggcgcacacggcattacggcgaacgcggtcggccccggcccgatccgcacagaactgttcgaccgtgctaatccgcccggtgcatcgcgcacgcagaagatcatcgactcggtgcccgtcaaacgtattggaacggccgacgacgtagcgcatgccgtcgcctacctgctcgacgaacgcagcggcttcgtaaccggccaaacgctatacgtctgtggcggcatgacggtgggtgtggtggatctctgaagcggctctctagcggctgacgagccatcacggccggggcgacggagcgctatttgcggtcaagaccgctcccatgattcgggcacatcgcctgtgggagcggtcttgaccgcgaagggtgccagcgcgtacgcctaccaatcgagctgtaaacggctctcgaaacaccgccgctcaccggtcagcgggtcttcggaccacacgctcggctgattcgcggtcgagaccgctcccacagatcgtgcacaccgcccgtaggagcggtcttgaccgcgaagggtgccagcaccctaccaatcgagctgtaaacgactctcgaaacaccgccgctctccaatcagcggggcgccgaaatacacgatgtgttactacggtcgacggagagccgagcgctattcgcggtcgagaccgctcccacagtttcgtacccgccccgcccgtgggagcggtcttgaccgcgaagggtgccagcgcgtacgcctaccaatcgagctgcaaacgactctcgaaacaccgccgctcaccggtcagcgggtcttcggaccacagcctaggcttattcgcggtcgagaccgctcccacagtttcgtacccgccccgcccgtgggagcggtcttgaccgcgaagggtgccagcgccctaccaatcgagctgtaaacgactctcaaaacactaccgctcaccggtcagcgcatcttcggactacagcctaggcttattcgcggtcgagaccgctcccgcagtttcgtgcttcatccgcccgtgggagcggtcttgaccgcgaagggtgccagcgccctaccaatcgagctgtaaacgactctcgaaacaccgccgctcaccagccagcgggtcttcggaccgcagcctaggcttattcgcggtcgagaccgctcctacattttcgggcccgccccgcccgtgggagcggtcatgaccgcgaagcgtgccagcgccctaccaatcgagctgtaaacgactctcgaaacaccgccgctcaccggtcagcgggtcttcggaccacaccctcggcttattggcggtcgagaccgctcccacagtttcgtacccgccccgcccgtgggagcggtcttgaccgcgaagggtgtcagcgccctaccaatcgagctgtaaacggctctcgaaacaccgccgctcgccggtcagcggatcgtcgaactgcagcccgcgcgccagcagcttgagtggccggtcgtagtcgtcctggtcacgccgtgcccgttcgatcagctcggggtagaacgggtcgttgcagatccccgcgcccagcgtggccatttgcaggcgcagctgatgcttgcgcccggtgaccggatgcagcgcatagcgccagaacccgccacggcgctcgagcacctcgatgcgagtctcgctgttgggttcgtcctcgccctgcttcatcaggaagaacggctcgccgtcgaccatgtgcagccgttcggtgcgagggaaatccagatccggcagcctcgggcagatcgcctcgtagaccttgctgatcttgcgctcacgaaacagcgcctgataacggccgcggctctctggcgtagtggagaacagcaccagcccggcagtgagccggtcgatgcggtggatcggcaccagatcgggattgccgagctgcttgctcagccgcgccagcagggtttcgttgacgtattcacccgccggcatcaccggcagaaaatgcggcttgtccgccaccagcagatgctcgtcgaggtgcagcacctgcgcgtcgaacgggatcggcttctcggccggaacctcgcgaaagtaatgcaccttcaacccgacctgatagggatgatcggccgcaagcggaagtccatcggcgccctgtacgcggccgcgggcgaagcggtcgagccaggtggcgcggtcgatggccgggaagcgcgcacagaggcagtcgagcagggtcggccagtcgccctggggcaggtgcagcgtgctgcgggcatcgggaagactcatcggaatatcgcatgggcataggggctgccgatgatacccgagcacgccgccggactcgtcccgcaacctgggaggcgaaagccatgcggcatgatcgctcgtcactttttgaaataattcgagaaaccctcgcgccctcgtccggtccagacaagaacagcaggcatccggggctgcgaaggccgcttccattgcgcgtgaagtcagcgttgcgtgcgaacgcctccggcataccagccctccctttgtctgaaggtccatcaggccaagcgaggtttccatggcaatgacagtcggtgactacgtaatcgaacgcctctaccagtggggcgtgcggcgcatctatggctatcccggcgatgggatcaacggggtcttcggcgcgctcaatcgcgccaacgggaagatccgtttcatccaggcgcgacacgaggagatggccgccttcatggcctcggccgatgccaagttcaacggcggcctcggcgtctgcatcgccacctccggccccggtgcggcgcacctgatcaccggtctctacgatgcgcgtctggaccacatgccggtgctcgccatcaccgggcagaaatcacgcaccgcgctgggcagccattatcagcaggagatcgacctgcctgcgttattcaaggacgtgtccggcgcgttcgtcgaacaagccagcgcacccgcccaggtcaggcatctgatcgaccgggcaattcgcaccgcggtcggcgaacgcaaggtggcgacgctgatcctgcccagcgacattcaggaagccgaatacagcgaaccgccccgctcgcacggcgcggtgcattccggcatcggctatacgcggccgaaagtgttgccctatgaggccgacctgcagcgcgccgccgaggtgctcaatgccggtgagaaggtagccattctggtgggcgccggcgcgctcaatgccaccgatgaagtgatcgccgtggccgaaaaactcggcgcgggcgtcgccaaggcgctgctgggcaaggccgcggtgcccgacgacctgccctgggtcaccggctccatcggcctgctcggcaccgagccgagctacaagctgatgaccgagtgcgacaccctgctgatgatcggctcgggcttcccctattccgaattcctgcccgaggaaggccaggcgcgcggcgtgcagatcgacctcaaggccgacatgctgagcatccgctacccgatggaagtgaacctgcaaggcgactcggccgaaaccctgcgcgcgctactgccactgctcgaggaaaagaccgagcgcaagtggcgcaaaagcgtcgagcaatggcgcatggactgggaggaactgctggaaaaacgcgctctggtcgaggccaacccgatcaacccgcagcgcgtcgcgttcgagctgtcgccgcgcctgccggaccactccatcgtcaccagtgattcgggctcctgcgccaactggtacgcccgcgacgtgaagatgcgccgcggcatgatgggctcgctgtccggaggtctggcctcgatgggcgcagccgtgccttatgccatcgccgccaagttcgcccacccggaacgcccggtcgtggccatggtgggcgacggcgcgatgcagatgaacaacatggccgagctgatcaccgtcgccaaatactggaaggagtggcagaacccgcagtggatctgctgcgtgttcaacaacgaggacctcaaccaggtcacctgggagcagcgggtaatggagggcgatccgaaattcgcggcctcgcaggatatccccaacgtgccctaccaccgcttcgccgagtccatcgggctgaaaggcatctacgtcgaccgtgaagatcaggtcgcagctgcctgggacgaggcgttcgcggcggatcggccggtggtgctcgaattcaagaccgacccagacgtgccaccgctgccgccgcatatcaagctggaacaggccaaggcctacgcctcggcgctgctgcatggcgacccggaccagggtgggatcatcaggcaatcggccaagcaggtgctgagcaaggttctgccggggcacaaggataagcaatgaccgcgcggcctgacgccgccatccgcgcgctgcgggtggcggcctaccgcgtgccgaccgatgcgcccgaggcggacggcaccttcgcctgggacgccacaacgctggtgctggtcgaactggacgccggcggcctgacggggctcggctatacctacgccgatgcctcgctggtgcggctgatcgacgggcatttgcgcggcctgatcgaaggcgcggacgcgttcgccatggcctcgctacgcatgcgtcccgagtggttcaaggcgcgctcgcagttcggctacggcttcgactggccgctcgactggcaggacatgtggcgctactacgcggaagtcgagcaggcgctgaagatcgccggcccggtgcgctatccctggggcccgaagcggccgcgttacccctaccgccaacatgaggtgaacgcctccggcctggcgctggccaaggcctgcgaagccatgggcgtggcttggtcacctacgccgctggcgaccctctctgcgccgcgcgacaatgcgccgccctgcgtctaccgcggtttctgcgtcaccggctgctcgaccaacgccaagcagagcgtgctgaacacctggatcccgcgagcgctggatgccggtgccgaaattcgcgacctggccatggtcgggcgtatcgaaacggatgccgagggcctcgccagcggcgtgcattaccaccgacggtcggtggcgcttccagcgcgcgcgcaacgtggtggtcgccggctatgccatcgaaacgccgcgcttgttgctcaactcggccaatgaccgctaccccgagggcctggccaatagctccgggctggtcggcacgcacctgatggcgcacaccaaccaggcggtgtggggcgaggtcgacgaagatatccgctggtacaagggcccgccgtcgctggcggtgtgcgaatactggaattatgaagaccgcggcaaggatttccacggtggctatgccttcatgagccagggcccgctgccggccgcctgggccgcgacccagaccggcaaccacggcctgtggggccaggcgctgatcgatgagatgcagaagtacaaccatcaggtcggcctgaagatcgtcggcgagacccagccgcagccggccaaccgcgtcactctggttgatgaaaaggatcagtacggcctgccgatcgcccgcgtcacatggtcgatgtgcgacaacgaccagcgccttgtcgaccacaccgtcgacttcatgcgccgcggcctcgacggcatgggtgcgcgcaacatctggaacgaatccgacggcaccgcgcacctgatgggcaccgcgcgcatgggcagcgacccggcgagcagcgtggtcgatgccgactgccgcagctgggacatccctaatctatggatctgcgacggctcggtgttccccacctcgggcggggtcaacccctcactgaccatccaggccatcgcctgccgcaccgccgaccgaatccgcaccctggccgcgcgcggcgaactctagcagccggcactcagcgcttgtcgatggaaaccagcgccgcctcgtcgccttcgctctggaagccgatccgcacctcgtcgcctacggccaggccttcgagttgctcgcgccgggcctggaattccatgctcgaggctggccacttcagcgctgggaccgggccgtgggcgatggtcaccacgccgcgttcgcggtccagcgcttcgatcgtaccttcggcgcgcatgacaggttcggacatcagctcggtagccggcccggcatcgatttccggcgcgtctgccggctccgacggtttgagcagatcctgcgccggtgcaacctgggcaagcagcaacaagccgagcgcgagacagtgggacgatttcatgacggacctcctggcagcaggtggacgtgcgctgtattggacaacggtgtggcgacgtttgctgccggcgttgcgacgtggcgggttcagtttcgtgtaagccaggatcggtagcctgtgaatcgtcgaaacccactgaggaaatcaccatgaaaacactcactaccctgatcaccgccgccaccctgaccctgggcgccaacctcgccatggcccgcgacctgggcccggatgaagccctgaaactgcgcgacgccggtaccatccaatccttcgagaagctcaacgaagcggcactggccaaacatcccggcgccaaggtcgaggagaccgagctggaagaagaatacggtcgccacatctatcaggttgaattgcgcgacgacaaaggtgtgcaatgggacatggagctcgacgccaagaccggcgaagtgctcaaggatcaccaggacgattgatgcgacccgccattcttttcacccttccattggccctgctgctcgctgccaccccggcggcgagccgcgacctggatcaggacgaagccctgcgcttgcgccgcgacggtttgatccagccgctggaaaccctgctgcacgaggcattagcgcgtcatcccggcgcgcgactgctggaagcggagctggaagaagaggatgaccgctacatctacgagatcgaactgctcaccgccgacggcgttgcgcgtgaactggaactggacgcgcgcgacggtcgcatcctcaaagacgaagaagactgatgcgcctgctactggtcgaagacaacgtcccgctggctgacgaactgaccgccagccttacgcgccagggctatgcagtcgactggctggccgatggccgcgacgccgactaccagggcggcagcgagccttatgatctgatcgtgctcgacctcggcctgcccggcaaaccggggctcgaagtgctgcgggcgtggcgcgcacgcggcgtggcgacaccggtactgatcctcacggcacgcgactcctgggccgagcgcatcgacgggctcagggccggcgctgacgattacctcaccaaaccctttcaccccgaagagctgctgctgcggattcaggcattgctgcgccgcgcccacggcattgccaaccagccgttgctggaagccggcgggctggccctggacgaggcccgccaacgctgtagcaaggatggccgggatatcgagctgactgcaggagagttccgcctgctgcgctacttcatgctgcaccccggacaattcctgtccaagacgcagctgaccgagcacctctacgacggcgaaaccgaacgtgattcgaacgtcatcgaagtgcacgtcaatcgcctgcgcggcaagctcggccgcgagctgatcgaaacccgtcgcggccagggctaccgcttcggcggcgccctttgaagtcgatccagcgcagcctcagcctcgggctgatttcagcgctgctgctgattggattgctgctggtgcagaccagcctgtggctgttcgagaccgggctgcgccgcaacctggccgacgacctgcgcgaagaaaccgaaggcctgctgattgccatggtgcggggcacggaaggcttcaagctcgacgcaacccggctcaacccacgttatcaacgggccttttccggccattatttccgcatcgaactgccgacgcgcagttggcgatcgcgctcgctatgggatgcagagccggcatggccgagcgataacggcctggcccgcgacctggtggacgggccacagcgacagcgactgttgagttatcgcgccgaataccaccgtgatgggcaactcatcgtcatcagcgtggcgcgcgactacacgccgatactcgaaagcttcgcccaggttcgcctgggcggcctgggcctggtgggcgtagctctcttcatcttgctgttgttgcaacgctatgccgtcaagctcgccatgcggccgttggagcgcgcacgccggcagatcgcgcaattgcagcagggcgagcgccagcaattggatatccaggctccggtcgaactgcagccgttggtggaacagatcaatcacctgctggcgcacaccgacgagacgctcaagcgttcgcggcacgcgttgggcaatctgggacacgcgctgaaaacgccgctggcggtgctcggcagccttgtccggcacgaggaactgcaggctcatccgcagttgcaggcagcgcttcgcgaacagctggagcagatccagcagcgcgtcgcccgtgaactggggcgcgcgcgtctggctggcgacgtgctgcccggcgcctatttcgattgcgccgcggagctcgcgccgctattcgacacgctgcatatgatccaccgccgcggcctgcatctgcactggcatacgcatgaggactgccgcctgccctgggaccgggaagacatgctcgagctgctcggcaatcttctggacaacgcgtgcaaatacgcccgatcagaggtgctgttgagtatcgaaccgacgcctgagggctatctcattcgggtggaagacgacgggccgggaataccggaagatcaacgcgaagcagtgctggagcgcggcattcgtctagacgagcgcgccgaaggacacgggctgggacttggcatcgtgcgggatatcctcgccgcctggaatggccggctgaccctcggacagagtgctctgggcgggctgcaggccagcgttcatctgcctgcgcacaagcgtcgggcggaatgatcgagcgaatcggggataaaagacggtgacgcggtttactgcgggcgcgccagttctctgcgcatgtcgtccaacatggtttccaccagcaagccgttctgcacttgccggccagagaccgtccgaatggcctctgtaccgttgatgggatagccgacgcgaaccaccaggtagccatcgtcctggggctctacgcgggttttgtagtcagccgggaaattctcggcaaggtaacgggacaaggttttcatgaacgcctcgtgcgctgagtctgcaacaaagacccggcgatgcacttggagattccgaaccactcatcggatgaccgtccatcgacaaaaaactgtaaagcgcaacgcccgtcccgatcactcccggtcgttcgcaccgtaggccagccaggccagaacacccatgccggcggcggcggtagcggaaaacagcagcacgttggataacaggctcatgtctcatcgtcctcgttcggctcgcttgatgcacacccggaatatatgtagctttgcgcgacacgtcgagctagccgatagtggcctgtaaagttttccagcagatgaggcgcgtatgaaacgcaagcaatcgatcagccagatccgctgggatctggccctgcgttaccgcctgatagagacgatcgcctggtgggaaggccgtctgaccacgggtcatctgatacagagtttcggcatcagccgccagcaggcatcgaaggacatcaacacctacctcaacgagcacgcgccgaaaaaccttacatatgaccgtcacctgaagggttacaagccgagcaagcagttcgagccactgttcatcgacggcagcgccagcgcctacctgcacctgctggaccagaaccgcgaccgcgccccgcacatcgagggcttggcgctggcctatgcgcataccgaagtgctgcacatgcccgaccgcagcatccgccccgaggtgctgcggccgatcctgcgggcctgccgcgaaggcctgcggctggaaaccgaatacgtctccctcgcccatcccgacgtcgagattcgcgtgatggcgccgcacacgctggtcttcaccgggacccgctggcatgtgcgcgcctattgcgagaagaaccgcggcttccgcgacttcgtcctcagccgcttccgtggcgagccggacctgatggacgtgagcgacaaccgggccgagcaggacgaggcctggaacacgccggtggacgtgatcatcgagccggacgtgcggctgagcgccgagcagaaatcaatcatcgagaccgattatgggatgcaggatggcgagctgcgcatcgctacccgaggggcgctggtgcagtacgtgctgcagcggtatcagatcgatccgaatacggtgctggccaatgcggcggcacagcagattcaggtgaggaatctgcaggggttgaaggtttggttgtattgatgagcccgctgtgcggcctcgtgctccgtaggggcgaatttactcgtcggtctacgttcgctagacccgctacaagtaccgccgcgctctgttcggtcgcgcctgactccgcaattgcttttcgtaggagcgagcttgctcgcgatcaggtggtggcgacgcgctcatctttttacgacgccgctttgtcgtcgtcccgcacctcaggtttcgccctgctgggcgactcacttttttcaaacgcccggatggccggcccctcaaaagtaagcaaaaacgcttgcccctgcatccgggcctcgcttcgcgagacttccttcattccatcgctgctccgagggtcgccgcgcaagggccatccatggcccttcatcggggggacgcctagtcctctcgcggcatccatgccgctcgcccctctgcgcagcgattccattcggccttctgaaaggggcgttcggtggcgcctggtaggtcgtgcgatggaaaagcacaaagccgcttcgaaccaaggtgaattgaccagtggctgtgggcgattcgtagggaggaaaactgcgaagcattttccaccgcaatcgacgcaacgtttggtaccgaactttgccaacgaaaatcggtgggtaagcttcgcgttacccaccctacgtcgagctcttacaaccgcctcgctgcatgccctatcagacaccaccgaatcgcccctttcacaaggccgagcgcagcagctcgtaggatgggtgcaacccatcaaactcttgcgatgggcttcgcccatcctacgttttgtcgaccctagtccagtgcagccccattcgcggtcgagaccgctcccacaaggacgcgtcctgcttccacaaggaggcgtcttggaatgccagcagccttctgcgccctcaagcctcggcacctctcaactgctcggaactgcccaaccgacggcaaagcaacaccaccccgtgggagcggtctcgaccgcgaagcttttatccagccaacagaaacaccggagcgctggccagaacctgaaaccaaaccaaacgcatcccggaacaacgcacagccccaatcgcggtcaagatcactcccacagcgtgcggcatcgctaccccagcgcccggccaacgacggccgccgtccatctcttcaagaaagccctacagccatgcgcctgatccacacctccgactggcacctcggccagaccctccacggccaggaccgcgactacgaacacgcgcagtttctcgtctggctgctcgaccagcttagcctgcatcagcccgacgccctgctgatcgccggcgacatcttcgacacggtcaacccgccgctcaaggcccaggaacgcctgtacgacttcatcgtccgcgcccatgaaaagctgccgcagctggacatcgtcatgatcgccggcaaccacgactccggcgggcgcatcgagctgcccgggccgctgatgaggcgcctcaacgcccacgccattggccgcatcagttgggtcgcggaaaatcgactcgaccacggtcgcctgctggtaccgctacacgacgcgcagggccaggtggccggatggtgcctcgccctgcccttcctgcgccccgccgaagtcaccggcggcgatgcaggggatgactacatgctcggcatccgccacgtccaccagcacctgatcgccgccgccgaagcccaacgccagcccggccaggcgctgatcgccatgagccatgcgcatatggccggtggcgcggtgtcggaagattcggagcgcaacatcgtcatcggcaatgccgaggcgctgccggccagtctgtttcccgagcccatcgcctatgtcgcccttggccacctgcacaagccgcaaaaagtcgccggccaggagcgcatccgttacagcggctcgccgttgccgctgtcgttcggcgagatcaactacccacatcaggtattgctggtgagtttcgatggcgatcagttgagccaggttgaaagcctgccggtgccgcgcgccgtggagatgatccgcatcggccgcgcgccactggcggacgtcatcgccgccctcgaggcgctgccagccatgggactgttcagtgaaaacctgccctggctggaggtgcgcgtacagctcgacgagcctctgcccgacctgcgtcagcgcatcgaaaccgcgctggccggcaaggcctgccgcctggtgcgcatcgccagcgagtacgccagcaagcgtggcgaggccgactcggaagtcctgcttggcctcgaccagatcaccccacaggaactcttcgcccgcgcctgggaagaacagttcggcaaccctccggacgagcaggcgctggacgattttgccagcctgttgcaaggcgtcgagttcgccagcgaaggagacggcaaatgaagatcctcgccattcgcctgaaaaacctcgcgtcgctggcgggcgagcaagtcatcgacttcaccgccgaaccgctggccagcgccggcctgttcgccatcaccggacctacaggtgccggcaagagcaccattctcgatgccttgtgcctggcgttgttcggcagtacgccgcgcctcgacggcgcctcgctgctgagcaaggtgcccgatggcagcgacgagatcggcagcggcgacgagcgcaacctgctgcgccgtggctgcggtagcggctacgccgaggtggatttcgtcggcatcgacggccaccgctaccgcgctcgctgggaagtcaaacgcgcccgcgagaaggtcgacggccgcttgcaggccagcagccagagcctgctggatctggatcgcgaccagctcctggccagcggcaagaagcgcgaattcaaggagctgctcgaagccagactcggcctcaccctggcgcagttcacccgcgccgtgctgctggcccagagcgagttttccgccttcctcaaggccgacgacaacgaccgcggcaccctgctggaaaagctcaccgacaccggcctctacagccgcctcggccaggccgctttcgaagcggccaagcgcgcccgcgaagcgctggccgccttgcaacaacaggccggcggcgtgcagccgatgaacgccgaggcgcgccaggcgctggaggcacagtggcaggagcaacaagccgagctgaaagagctgcagcagcaactcgacgcgctcaaacaacaacgccaatggctgcaggacctggcgcgtctgcaagcagagcgtgacggcgcccgacggcagctcgccgaggccgaagaagagcaggaaaacctcgctgacgcccggcgcatcctcgacctgttcgagcagctggcgccgcaacgccatcgctttctacgtgagcgggaactgactccgctgctggcaaaggtcgaggctacgctcgcccgtcacacaggagaacacgccgccgtacaggagcgactcgaaacgctggaacaggcctgccggaacgccaccgaggcgctgaaagccgccgagcatgggttgaaggcggccgaaccacgactggctgcagcgcgccgtgaagaggagcgtctcgtccacctgcgcagcgacctgcgcgacgcccagggacaggctgaacaggccgaaatcgcgagcaaaaccggtgaacgcaccctcgcccagctgcgccaacatcaggaacaggccgccgggcagctcgccaatctgaccgaccagctcaccaccagcgccgaattgcaaccgctatgcgcagcctggagcggctaccgcccacgcctgcaacaggccgtacagatcgccgcccgcctgcagcaaggccggcaggaattgcccggtttagaagctgcctctaaagctgccgaaacggcgcagaccaaagccagagaggctctggatgagttgcagaagcagatcggtggggaggccagccttggcgaccagctggcgcaactgacgaccaagctcgaggcgcttcgtgaagccgaacgtgcgttcgacagcttgcacggcctctggtcccgccagcagcagttggccgcgcagcagcacaggttgcagagcgacaggagccgtcaacaaggcgagctggacaagctgaccgaagccggcaagctcgcccgagccgagcgcgacgacgctgaaaaagcgctgaaagtcgtgcaggcgctgctggatcgccaacgccttgcccgcagcgccaatgtagaggccttgcgtgccgcgctggtaccgggcgagccgtgcagcgtctgtggtagcgccgagcatccctggcacgacggcgaagcgctgctcgccgcactcgatcagcaggacgagcgcgaagccgagcaggtgcaatcgcagctcaaagcccaggaggaaaagctgcaagccctgcgcgatcagcacatcgccctgtcctccgagatcaagcagaacgggcatcgacaagcggaaatcgccgacgacctggcgaagctggacgctcagctggccgagctgccggcgtacacggaactgctgaaccaggcgcaagcagagcggcagtcctggctcgacaaccgcatggcctcgcacaagtccgctatcgctgacgccaataaccggcaacgcgaactgctcaacctgcaacggcagaccgaagcgttgcaaacgggctggcagagcgcacgtgacgcctgcgttcaagccacgcagatcctcgccgcacagcgcgacgccatcgcccgcgacgatgcgcggctcgaggaagagctggcggagttcgccgcgctgctgcccacagacatgctcgagcgttggcgcgaaaaaccggccgagaccttcatgcacctggacggacggatcgaggcgcggcgccagcaagtcgagcaacaaacggaactggccgacgagcagcagcaacgccaggccgcgctggagcgcgagcagttgcaacagcagcatcgcctggcgcagcacaaggcatgcgccgatcggctcgcagagcttcagacccgcgaacgggcctgtcgccaggcgctggacgatagcctcggcgagcagcccagcgcgcaggcctggcaacaggcgctcgacagcgcaatccagacagcccgtcagcagcaggccgaggtcgatcagcgactgaacgaggcacgggtcgagctgacccgcctcgcaggcgagcaggaaaattgcagccggcgccgcgccgagctgctggccgagcgcagcacgctcagcgaagagcttgagacctggcgcgccgcgcatcctgatctggacgacgcgacgctcgaacaattgctgcagctggacgacacactgctcgctgaggcacgtgagcgtctgcgcgccaacaccgagcagcttgtccgtggtcgcgagcgcctggagggctgcgagcagcggctgcaggcgcatcaggctggacagccgaacccaccggacgccgaaacgctggagacgcaactgaacgctcagcaaaccagttgcgacggtgccgaactgcgctgcagcgaaacccgcgccgcgctgctcgatgatgatcgtcgccgtagtcagagccagacgttgctggagcaggttgccgcggcgaccgccgaaagccagcgctggggccgcatcgccgccttgatcgggacgagtgacggtggcgccttccgcaagatcgcccaggcctacaacctcgacctgctggtgcagcacgccaacgtgcagctgcgccaactggcccgacgttaccggctcaagcgcggcggcagtccgctgggattgctggtgatggacacggagatgggcgacgagctgcgctcggtgcattcgctgtccggcggcgagaccttcctcgtctccctggcgctagcgctgggcctggcctcgatggcgtcgagcaaactgaagatcgaatcgctgttcatcgacgagggcttcggcagcctcgaccccgaatcgctgcagatcgccatggacgcgctggattcgttgcaggcccagggccgcaaggtggcggtgatttcccacgtggcggaaatgcacgaacgcatcccggtgcagatccaggtgcagcgacaaggcaacggccagagcgggctgaagatcatcggcgggccgggcgactgaggccgcgccctgcccggcaatcgcaggcagagcctgctcctacagaaaatacccacctccgcaccgttacgcttttgtaggagcaggctctgcctgcgacccgctccaccagcaagcctcgaccccgagtcgctgcagatcgccatggacgcgctggattcgctgcaagcccagggccgcaaggtggcggtgatttcccacgtggcggaaatgcacgaacgcatcccggtgcagatccaggtgcagcgacaaggcaacggccagagcgggctgaagatcatcggcgggccgggcgtctgaggccgcgcctgcgcggcaatcgcaggcagagcctgctcctacagaaaaataccacctccgcaccgttacgcttttgtaggagcaggctctgcctgcgaaccgctcccacccgcgagccaatatcgtcggcgcataacccacccacaccccaacgaaccgcccacgcataaccaacgccccttgtaggagcaggctctgcctgcgacccgtcccatcggacgaacatcgtcggtacagccacccatacaccagtgaggcacacccgcgtggctggcacccgccgtctcgacagctccatgaaaggttcgctgattaagctgtcgcggttttcgccagcgcgctcgcggaaaccgcgcatggccacaagccgtgcgtcagtccttcaatacgttgcggaacggcggccggccacaagtcggtgcggcggttccgcttttttatgcataggcggtccagcggggacgggttgagggggcagcggtcgcaggcagagcctgctcctacgggaaaaatggccgccggtggactccgttgcggttggtgcctcggggatcatccgcccgtcgggctcgaacctctcgggtactccacgggcccaaccgttgaggtctcaccgacggagccgtctatgcctaccaccgctgccgcgctagaagcgctccataccgacggcttcgtgctgctgcaaggcgtgctggacgtcgcacaggtcagcgccgtgcgcgccgcgatcgatgcgctcgagccgatccactgggattaccaggggctggtcgacgaccactacaagtgcgttttcaatcgcgccccgttctggctgccctacctcgatcttcccggcgtcatcgaactggccgaagcctgcctgggtgccgactgccatgtgatcggccagaccgcctggcgcagccatccgggcttcgtcggcggcgagctgcatgccgactatctggccatggaactgccggagcactggctcgccgagcccggtttcgagctgccgatgcagatctgcacggcgcacatctatctcgaccggatcgatgcggacctctgcccgacccgggtgattcccggcagccaccgcgccggtcgcaagccacgccccggcgaaacccagtggcacggccacgaacccgagccggtgctctgcgacgcaggtgacgtattgctgtttcgcagcgatctctggcacgccggcagccgcaatcgcacggccgaccgtagccgctacctgctgcaggtgcattacggccgacggatgatcgcgcagaagttctcgccctacttgcagtggcgtttcaatcccgaggtcctggccgcggccacgccgaggcagcggcgcctgctcggtgagcacgacgcctcggaatacgactgagcagcgcgccgggccaaggcgaatccccggcggcggacttcgtccgggctaccagccccctggcatggcttctgcacgcagcattcggtggtcgccaagtgcgaccaccaaactcgccaatgcccagcccgctgaagaggtcgccatgatttcctgccgcagccaagtcacccagatgatcgtttccgccaaggtacgcaaaggcctgaaatgggccgcggtggccgacgccgtcggccagtccaaggaatgggttacggccggttgcctgggtcagatggccttcgacaaggcgcaggcggaaaccctcggcaaactgttcgagctgcccgacgaggcggtggcctggctgcagatcgtgccctacaagggttcactgccgaccgcggtacccaccgacccgctggtctaccgctggtacgagctggttaacgtctacggcagcaccatcaaggaactgatccacgaggagttcggcgacggcatcatgagcgccatcgatttctcgatggatatccagcgccaaccggacccgaagggcgaccgggtcaatgtggtgatgtccggcaaattcttgccctacaagcagtactgaacgcacccgatcagtgcacgtcggcgccgagcagttgcacgctggcctgcaactcctgctgttcgctcaggcgtagttgggtcaggtaggcgaccactgactcgatgtccgcctcggacagcttgtcggcgatccccatcattaccgagccggcccggctcgggtcatgggtgcgaaagcggttcagcgccttgctcaggtattggctcggctgccccgccagtcgcggcatgttctccttgccctgcgcatggctgccatggcagccggcgcaggtgtgctgaaacagcgtcgcgccacgctgaacctgagccgcgtcgcttgtgactgccacgggctcgaccttttgctgactgaagtacacggcgatgttgacgcgatcttctagggtcaggctcttggccagtttcgacatcacgaaatcgatgcgctcgcccttggcgaacttttcgaacgactggaacagatagatcgggttctgtgacgccaggttgggaatatgcggacgcttgctgttgccgttttcgccatggcaatacccgcagaacagcgcacgctcctggcccgccgcataagcctgctcacgccgctcggcatcgcccatcaggtaatgaaagcgttcgatcgcctcctcaccggcgtgggcgaaaggggcgaggcaactgagcagtacgagggtcatgaggcgcatgggcgagtccggcacgggttgatgtttagcctgaaggcagcaccggactatagggagaaaaccagccgagatactggcacaagtcaataaagcgttcaccctcgtgcccgggtggttgcggcgcgcgcaccggttcgcgttatggccatgcaggtcgggcggcacgtcgccggagccaatacggtacgccatcggcgccgcccagctatgctgccgataagcctgcgcgctaatgccacattgaccctcgaaaaataaacgtatggcagatcgcatcgagcctcacacagccgcttcgtattcgactaaagtagcggcccctttttgccagcacgagccgcgcaccatgctagatggacatgccgaactgaccatgaccgtactgatgactccggacaaggccaacttttccggcaacgttcatggcggcacgttgctcaagtatctcgacgaagtcgcctatgcgtgcgccagtcgctacgccggccagtacgtggtgaccctgtcggtggatcaggtcaattttcgccagccggtacatgtaggggaactggtgacctttctcgcctcggtcaactacaccggcaacacctcgatggagatcggcatcaaggtcatcaccgaagacatccgccagaagaccgtccgccacaccaacagctgcttcttcaccatggtggccgtcggcgaagatggtcgccccacgaccgtcccgaccctgcagccgcagacgcccgatcagaagcgtcgcttcgcccaggcccagcaacgccggcagattcgccgcgagctggaagagcgttaccgggcgatcaaggacgattactgagtcaaaggccgtcatcccagcctgagcggatccttccgatccgaccgtactgaccagcgccaaggagcgagcctgtgcaccgctcgcccttgacctgctaaaaccctatacaatccgcggcttttccccacctgccgaggatctgccgtgagcgctttgccaccctgcccccaatgccactcccaatacacctacgaggacggccagatgctggtctgccccgagtgcgcccacgagtggtccgccagcgccgccgaagcctcgggcgacgacgaaaagacggtcaaggactcggtcggcaataccttgcaggacggtgacacggtcacggtgatcaaggacctgaaagtcaaaggatcatcgctggtagtgaaggtcggcaccaaggttaagaacattcgcttggtcgacggcgaccacgacatcgactgcaagatcgacggcatcggcgcgatgaagctgaagtcggagttcgtgcgcaaggtctgaacgtggttgtgcgctcgagcgccttgtgggagcggtctcgaccgcgaacaaacggggctccggcgcagactattcgcggtcaagaccgctcccactgcacttctgccgttgcctgaaaggtctgcctcaggccggatgagtttcagcccacctcttactggtaaaaatcgacccaacagatcgccgcaccttgcgcggccccgctcggtggtgggccggaatgcctcgacgggttccacccgccctacgcctgcgctgcgtgaagcaacttgtgggagcggtctcgaccgcgaacaaacggggctcttgtgtagccccattcgcggtcaagaccgctcccacaggcacctctgtctttggctgacaggtgtgcctctggaccggatgagttcagcccaccatttactggtagaaaaaccgactcaacacttcgcagcaagttgcgcagctgcgatcaatgggtggctgaaatgcctcggcgggtttcacccgccctacgcctgcgctgcgtgaagcgaattgtgggagcggtcttgaccgcgaaaccaattgggctccggcgctgccccatttcgcggtcaagaccgctcccactgcacttctgctgttgcctgacaggtcaggtgatcagatgccaacgactggcacctgatcgacggtcgccccgctcaaggcgtcaggtacgaagagcgtgtcagccccagccgcagcgcgtcgatgtattgcgtccgttccttggcactcagacgtgcgctggataccttgtcgcggtagtaggtcatcagctcttcgggcgacaggtgcacgtagcgcagcatgtcctcgatggtgtcgtgggtctcgatgccagcgtggtagaagctgccatcctcacgctggtaaacgttgaccgaatcggtatcgccgaacaggttgtgcatgtcgccgaggatctcctggtaggcacccaccaggaacacgccgaggaaatactcctctcccgcctggatctcatgcaccggcatgctgttctcaatgctctgctcgtcgacgtagtgcttgatcttgccgtcggagtcgcaggtcagatcctgcaatacggcacgccgcacgggctcttcgttcagacgctgcagcggcacgatcggcaggatctggtcgatggcccaggtgtccggcaggctctggaacaccgagaagttgcagatgtacttgtcggccagcttgtcgttgagttcgtcgagcacagcccgatgcgagcgctgacgcgccttgagctggttgtatagccggcggcagatcgcgaagtagctctgctcggccagcgccttctgcgccagggacagtttgcccgaggcatattgagcggccgcctcgctcatgtaatgggtggcgcgccaataggtttcggtgaccatctccgggtcggtcgggccgagcagatcggccagggcctgaacgatttccggcagctcgtcgtagttctcgatcgccggcgcctcgtcgttgtgccgctcgaaatcggtgacctgcatgaccagcaccgcatggtgcgccgtcatggcccgaccgctctcggagaagatatgcgggtgcggcaactcctgccgatcgcagaactccttgagcatgccgaccacggtgccggcgtattcgtcgatgtcgtagttgatggagctggcattgcgcgaatgcgtgccgtcgtagtcgacacccagcccaccgcccacgtcgatgtgatcgaccggcagccccagcgcacgcaactcggcgtagtaacgaatggcttcgcggaaaccgtcacggtaatcggccaggttggcgatctgcgagcccatgtgaaagtgcagcaggcgcacgccctgctccacacccgcggcgcggaaacgctcgatcacagtgagcagctgagcagctgacaggccgaacttggacttttcaccgccagtgtcggcccacttgctggaggccagcgacgacaggcgcacgcgcaagccgacctgcggaacgatcttcagctccgccgcttcttcgatgaccagcccgacctcggacatcttctcgataacgatgaagacgttgtgaccgagcttctgccccatcagcgccaagcggatgaactcacgatccttgtagccgttgcagacgatggtgccgcctttgggcgccagggccagcacggccatcaattcaggcttggaaccggcctccaggccaatggcgacgttctgcgtggcgatgatgttttccaccaccgcttcctgctgattgaccttgatcgggtacagcgcggtgtacttgctctggtattcgaggcgctcgatgttggcatcgaacgcgccggtcagccggcgcacacggtcctgcaagataccggggaaacgaaccagcagcggcagcgtcaggccggcatcgcgcagttgctcgatcaatccggtgaattcgacggcttcgccgttcgggccctgggggcggacctcgacatgaccctcgtcgttgatcgaaaagtagccagcaccccagtgacgaatgccgtagacgctacggctgtccgctgcggtccattggctgccgtcatctttacgtgtacgtcgtacgggcatctaagcctcctgagagtgggtgggcctgccgagcatagcgcgacgacagaagagcgactccggttggacagccggtacgcacagaaataagcgcaagcgcgctgttggacagaacaagacctcagccaccagacttcttcgccttgaaaccacgcttggtcagttcgtcgagcaggagctgaacatgatcaccctgaatctcgatgacaccgtccttgagcgcgccgccagtcccgcaacgacgcttgagcgcgctggcaagctccttgagctcggcttcggccagcggcaccccggtgacggtggtcacggtcttgcccccgcgccccttgctctcccggcggacccgagcgataccgtcgccttccggaataaccgactgtttacagacacaggcatccagcggctggctgcaatcggggcaatgccgtccggcatcggtggaaaacaccagcccaccaaggcctgaaaaggaagtggttttcttggccacacgaacctcttgagcgaagaaaaacgaggctcggcacgccggagccatcaaagcgcgccaatttatcagcaaatggaccgcactcgtagggttgcgccggccatcgccgtgatcagccccacgaatgcatggcaaacacgggcaggacggcgaagcgcgcggcagtcggctggcaggcgacccaggcggtagccaggcaagaagcgcaaccgagccagcgaaagaactcgcgacatggccaccgaaagagaagcgccgctggcggggaagcctccaccccaccttgtggcattaccccaaatatgccggaggcgcgacctgtggcgaataccgtcccaagaacgggaaacactccaaggcgaagcaaccggttaacacgcggcgttgggacagccgcgatgtccttcgttcactcactcgatgacgtcacagccgaccagtcggcgcgtacggttcgggatcgatacatggcgctcgctcgagcatcaggtccgccaacaactggcacgaagcgggcgccagcactaggccgttgcggaaatgcccgcagttgagccagagcccgtcatggccagggaccggcccgatataagggatgccttccggcgatgcgggccgcagcccggcccaatgcttgaccacctcagcatcagccaacgcgggcagcaagtcgacagccgtcgccctgaggctttccagcgcgtcttcggtaggcgtcttgtcgaagccgacatcttccagtgtgctgcccaccaggatatgaccgtcgcgccgcggaatcgcatagcgccgcttggccaacaccatgctcggcaggaaatcctcggcgcatttgaacaggatcatctggcctttcatcggcttgaccggcagttccattccaagcgtcgccagcaatttgccgctccaggcgccggccgccacgacgacgcgatcggcacgcatctcgccctgcgccgtttgcacgccaacgattcgctccgcatctcgaacgaaaccgcttaccgagcaatgctcgaggatctgtacgttgggcagttttgccagcgcggcgcgcaacgcctgcagcaaacgcgggttgcgcacattggcgacacccggcatgaacacagcgcgggaaaacccttcaccaagcgaaggcacagccgcatgcaccgcttccatgccgacgcgatacagcggccttctctgacgctgcgcccaggccaaggcctcgttctcatcttcaagatccaaccagtacaacccggtctcacgcacttgcggatcgatatcggtctgctcgaacagggtcttgcccagctgcggatagaaatcctgcgaccagtgcgccaacgccgtgatagccggactgtagcgccacggatacaggggcgagacgatgccgcctccggcccaggaggcttcggtgcccgtttcggattgctcgaacaaagtcacggaacaacccgcgtccgcaagcccatacgccgacagcaaaccgataacgccgccgcccaccacaatcgtctgttccttcactccgcctccggcactccggttcacattttcagccttttatccttggacttgcagcaatgctggtctacaaagcctttcgccgacttacgggacggccgaaaccaaagcgtgccaccaggaaggaggcacatcatacgtgcaaaggaaccgcaccatgccgaacagggatcaaggcttcacgcttgttgagctactaataacgttgaccgtactggctatcgtgcttgcggtcgccatcccgacattcacctcaacgctcgaatcggttcgccaacgcacgctggttaaccagctgctcgctgacctcaactttgcaagaagcagggcgataaccaccaggcgaccggtcagtctgtgcgcagggtcagccgaatgcgaccgccaaacgatttggagcggccagatactgatattcgacgacctggatgcaaacggcacaattgatgagaccgacgtgacgctacgcaccaccgcggtcacggcgagccataactggaaatggagaaacttccgccagcaacgacacatgacgttcaagcccgacggcacaacgcacagtctcaacggcaccttcatcctgtgtcgacaggaaactccgctgaagaagattgtgatcaacatcacagggcgggcgagacttgcgccacccatggtcgacgacctttgcacctaacatgccgcacagcctcggaaaccgaccgggcgtccgacggacatgggaagccgaacggcgaaccgggatgattcgatgaccctgaaactgagaagaaccatgcagcattcccgagctttcacgctgatcgagctgatgatcacgctcgcgatcctcgcgatcctgttggcgatcgcggcaccttcgttccgagacaccatccagaacaaccggacccagactatcgccaacgacctaaccactgcgctccagttcgctcgctccgaagcggtcaagcgtggtgtgagagtggatatctgccgccgcgatgcgaatgcctgcgccgacgcagccgattgggggaacggttggttggtgaaagtgaacggcggagcagtgctacgcgtatgggaagcagtaggtaaccagaatacggtcaccgggccggctgaaacactctcctataggccgaacggcctgctgaccaagacgactgcgacagatttcacagtgaagtttcagaactgctcgggcaaaccccaatacaccattgcactgaccgcgacaggacgagtgacgagcacaaagggaacgtgccaatgagaagctccatttttatttctgcccgccaacgcggcgcgacgctcatcgaagtccttgtcgcgatgctgatcctttccgtaggcctgttaggcctcgccggcatgcagatgacggcgctcaagagcaaccagagcgcgtactaccgttcacaggcaactgtgctggcctacgacatcatcgaccggatgcgcgccaaccgcaccgaagccttgaacggtgtctatgacatcgcgctgcagaaccaagcctgcgatccggatatcgcacccagcggaacactcgcaaaaaaagacgtagccgaatggctgaattcgctttcgtgtctgctctccggcgatgccaagggcagcgttgtccgaaacgatcgcgtgttcaccgtatccatcgagtggaacgacaaccgcggtcgcatcgacgatgccgcagacgacgatcgcgaaacctttgtctatcggacgcagctatgaaaccaatctctttctaccggcaagcaggcctttcgctcgtcgagctgatggtggccatgctgatcagcctgatcttgctgggtggcgttctgcaggtatttctctccagtaaagatatgtaccgcaccaacactgcggtggctcgcgttcaagaagcgggtcgcttcgcaactgactttatgacgttcgacgttcggcaggcaggctataaaggggagtgtctcagcgagcctaccaaccacctgaagctgacgactgctagtgccgacgttaaaaacgcctatagcacaacgcccgcgatccaaggatgggataacagcaagcctgtattctttggaggcacagacacaacgcgtacggatacggattcctttatcgtaaagtacgccggggatggtcaggagtttcaggcaggcggaacgaacaacacgaccgcccagagcttgacggtgaacaacagcacctctgtctacgaaggccaaatcgtcatattggctaactccacgggctgcgacgtgttccagaataccaacaaccagaacgccagcgctttccagaaggctggcggtaacgcgacgccgggcaatctgaaccaaaattggagccagtcatataacggttatatgaccgctcatgtcttgcgcagccattcctatttcatccgcgacaacgccggccgccttccctcactctatcgccaggtagtcagcccaagtcccgctgtagaagagcttgtcgaaggcatcattgaaatgcagatcacttacgggttggatcgggacggtgaccgccttgcggatgaatacgtaaaagctgggactaacaatctcgtttccaccggcgagggcgattggaacaaggtcgtttcggcgcgcatatccgtgatcgcggtcagtcccgaaaccaatgtgctcgaggaaccacagacgttcgtattcccgcccatcgtcggcattgatcgggatgatgcttatgccgtctacgctgacgacggcaccgtcaccatcaaggacaaccgcgtcgcacaggtctacaccgcgaccgtcgccatcaggaatcgactgccatgatgaagggaactttgggtttggggccctctaaacagaagggcgccgtattgcttgttgccctcatcatgctgcttttgctcactgtcataggcgtggctgcgatgcgcgacaccaacctgcaggaacgcatggcaggcaacatgcgcgatcatgcgctcgcatttcaggccgcagaggctgctttacgtttcgctgaacaagaagtcaaaacagactacgcagatctaatcagcgacacgctctatcccgtcaatgatgaaacccccgacgtcgtgaccttctccgggttcaacggcaacgtttaccaagcgccaacctacaccatcacccgtttgccccaccctggtcagctcgatatgcagaatatggtcaatccgaccaccgctggtggcgactcgctcgcggctggcgagtcgctgattctcgacttcgttctggtccgtatcgaagcgaccggcaccggcgccagcccggactcgaaggtcacccttcgttccttgtatttcgtagaggagtgacatgatgccgctcaattatcgtcagatgtcctggaacggacttacctgtacgtggcgcccgttgctgttggccggcatggcgctgtgctggacgcttggcgccagccaggccgccgcagacgtatcgcaaacaccgctgctgctgggtgcgagcaacgtgcccggcaaccttgcgctggtgccctccgtggagtggcccacgttgctatccattgccaacaccggcaattacagctctgccagcacctatctcggttatttcgactcggcaaaatgttacacctacgacaaagctaatgaatggtttgaacccgtcggatacgccacgtcgagaaaatgcggcggcaccaagcagtggagtggaaatttccttaactgggcgggaactccaacaattgacccgtttcgtagcgcgctaacgggtggatatcgctacagggatgacgttggtctcacggttctagaaaaggcgcggcatacgggacaaagcagtgcaggtaaccgcacgtccagtgccaacgtaccgcaaagtgaaattgaaggcgccactccagcaaagagtgattggagcaatttctacttgcgcttgagcggcttgggtgtcgacatgcttttctccaactggaacgacaagcttggagacgacaatgcctcactcgctgagcagatcgcttatgacccgaccgccacaagaccatgggacagtggccgcctgttaaagagctatacacctcaaaacagcaatacgctcaaaacggtgtatcgcctcaagctccgggttaaagtttgcgtcgcctcgatgcttgaagcgaactgcaaaaaatacagcgacaccaattacaagccagagggtctgctgcagcaatataacgaaaacatccgctacagcgtatttggttatttgaacgacgaaaaccaattacgcgacggcggcgtactgcgcgccggtcaaaaatacatcggacctctcaaaagagaacgtggcgtggccggccagatggataatttacgcacagaatggagtaagacaaccggcattcttgtaaccaacccgaaccctgctgatgcgacagcaactcaagcagcattcggccgaaccgtcagcaatagtggtgttatcaactatctgaacaagtttgggcagttgacgaccaaccagcacaagagcaatgacccggttagcgaactctattatgcggcgtttcgttatttccgaaacctcggcaacataaccgcttacagcacaccgaccccagctcacaattcgtcgccgggcggcacaacaaaagacaagtggcttgatggattcccggtcataacttcttgggatgaccctatccagtacgcctgccagaagaacgtcatcctggggatcggtgataccaacacacacgctgaccgcaacctgcctggggctaccgtaaccaatctcgaacccgctgctcctgccgaaattgttgcggacgccaccaatttcaacgtcgcaaccgccactacggtagttggtactctggagggcattgatacaaaagcaacgaccgcaggccagttcggcgattgctgcagtaataactccgcctatatcgcggggatggcgtaccacgccaataccgtcgaccttcgggacgatatcagcggcaagcaactgctctccacccactgggtggatgttcgtgagaacggcgtactgaaaggccgagccaagaatcaatattggctggcagccaaatacggcggtatcaagtttccaaccgataaggacgctgaggactacggtgacccttacgccccctcccaacagatccaacccagctggtggaccgatggcgatcggaccgaaatcggtgagcttcggcctcgaaacttctatgtagctagcgatgcaaccaagatggtcgaaagcctgaaaacagccttcgctaacatcgccaaggaagtcagtagtaccacagcggccctttcaacaaattcaaccaaactggaaaccgataccgtcgtgttccaatcgatgctcgatagcgccaagtggagcggggacttgctggccaaggcggtttccagtaacggcaccgtgagcacaacccctacatggaaagcggcacagaagttggacgcgctgaccaacgcacagacagctgatcgcgtcatcctgactaccacgccacctacggctgacagcacgacaggggcgctggtatcaacgacaggcagaaccttcctctgggatcagttgggggcaacacagaagaccgcccttcgggctacagccagcggaactctggcgacggaagcagtcggacaaaaccgacttgccttcattcgcggcgaccgcagccaggagcgcaccgatgccgcgcccaataatccgtttcgggagcgcagcagccggctcggcgacattgccaactcagacccgcagtacatctataaaccgaacttcggctactcccaactgcccgaaagcgccggttttaccagcgcaatcaagagcgcgtacaccacttttcgttcgcaaagctcttaccaaaaccgaccgccgctagtggtagtaggtgcgaatgacggtatgctgcacggcttcgacgcgagccttggcagcacaggcggcaaggagctgtttgcctatgttccgaatgaccttatcgacgagctacacgaactgaccgacccaacctatgcgcatcgctactatgtggacggtacgccccgtatcggtgacgctcttgtcagcggtcagtggaagaccctcgtagtcggttcgtccggcgcaggtggccgcagcatttttgcgctggatgtttccaaccccaccagcatgtccgccagcagcgtgctatgggagtttacccatgcggaaatgggctacagcctcggccgccccagcctggttccgctctacaacggtaagttcggcgtaatcgtcactagcggttatgaccggccgacgaccaccaccaatggttatgtctggctcttggatgcttcgaacggcagtgtgatcaagcgctttgacctgccgaacagcggcgatctcggtgcgcctttggcggttgatatcgataacgaccgcgtagcggatcgcgtctatgtagctgacacgctgggcaaagtgtggcgcctggacataactggcacgtccgtgagcggatgggatgccccaagcagcttgaaatcgggcggaaacatcactccgctattcttggcaaaggacgccagcggcgttgcgcaaccgatcaccgcacctctagacgcggcctatacaaaagaccgggaaatcatgctggtattcggtaccggcagcttctaccagaccaccgataacgaagtccctgactcaccgcaggtgcagtcgttctacggcatcgttgatagcggtgtccagatcaacgggcgaagtacgcttctggaacaggagattctgagagaagtaaccggcaccgagctcaatggccgagcggtcagcgacaacaccatgaccgatagccaccgaggatggtacctcgacctgcggtggaagaccgcgagagggggaactggcggcaagggtgagcgcgtcatttcccaggctcaattgggtggcaaccgcgtcaccttcagcacccttatcccgtccgcgaacccttgtgacgcaggcggcaccagttggatcatgagtctggacttggcaaccggcagccgcctcgtctattcgtattttgactacaacggcgacggcagtattgatgaggacgattacatcgaactggacgatggaacgaaggttcctgtcagcggcgtggccgaccccgacgaaggtgcggtcaagggtacgatcggactaaacgaccaaagtaccggcaaacgatatttgtgctatgccagctcggcatctagcaccggttcgaacggcgtgactccggtatgcatcgaagtcatgggaaacaacaacgattcaaatcgcttgtcctggcatgaagtgaggaaaaatctttgattacgttagtctcgtcgtcccagcgatcagcacggggctttacgctaatagagctgatgatcgtagttgccatcattggcatcatcgctgcaatcgcctatcccagttatcaggaatacgtccgcagcgccaagcgagccgacgccgaaacggctttgatggaactggcgcacttcatggagcgctactacaccagcaatggccgctacgtcaaaagcgatggaaacgggcccgatcttcccttcacccaggcacccaaggatggcggtgccaaggcctacgatatcagcctggtcgcagccagtacctccgccactggatacgtattgcaggccgtaccgacaggtagcatggccaccgacaagtgtggaaccctgacactagctaacactggcgccaagggacaaaaaaacggtatgacctcggccgaatgctggaaacgctaaacggctgaaacgaaaacgcccggcgtaaagccaggcgtttccattcgcgggctatcacaccgccttcaaccgcaattccttcggcatggaaaaggtcacattctccggtcggccgtccagctcgtccatgccggttgcgccccactcttttagtcgttcgataacgccacgcaccagtacctcaggtgccgaggcgccggcggtgatgccgattcggtcgatgttttcgaaccattcctgcttgaggtcttgcgcgccgtcgatcaggtaggccggcgtatccatgcgctcggccagttcgcgcaagcgatttgagttggagctgttggggctgccgactaccagcacgacatcgcattctcctgccaactgcttgaccgcatcctgacggttctgggtggcatagcagatgtcgtccttgcgggggccgccgatgctggggaagcgcgtgcgcagcgcatcgatcacgcggctggtgtcgtccatggacagtgtcgtctgggtgacgaacgccagttcttcagggttgcgtacctgaagattggccacatcgctttcgtcctcgaccagatagatcgagccgccattggcggtgtcgtactggcccatggtgccttcgacttcaggatgcccttcatggccgatgagaatgcattcacggccctcacggctgtacttggtcacttccagatgcaccttggtcactagcggacaggtcgcatcgaagaccttcaggccgcgcttgtcggcttccatccgcacggcctgggatacgccgtgggcgctgaagataacgatgaacccatccggcacctgatccagttcgtcaacgaagatggcgccccgctcgcgcagatcttcgaccacgaacttgttgtgcacgacctcgtgccgcacatagatcggcggcccgaagacttccagcgcacggttgacgatctcgatggcccggtcgacaccggcacaaaagccacgcggattggcgagtttgatttgcatatggcctctcgacgctcggggcgggtgagttgtgaagtgtatcgactgcgaatagcgctatggtggatagcagcggaccggcaactagcgaagcatcatggtcgtccgcaaacagcccttgaggcgccgcgtgcgggcgaccgaaaaactcagaccggtttgacctcgaatatctccacttcgaaggtcaacgccttgcccgccaggggatggttgaagtcgacagtgacctgacggtcatcgaagttcttgacgataccgggcaactcggtcttggccgcatcattgaagatcaccagcaaaccctccgacagctccatgccctcgaactgactacgcggcatggtttgcacgttttgcgggttgtgctgaccgaacccctgctccggggcgatctggaaggtgcgcttgtcgccggccttgagcccgaacagttgttgctcgaatccaggcaacagattcccgtctccgaccttgaacgtcgccggctgcttgtcgaaggtggtgtcgacctgctcgccgttttccaggctgagcgcgaaatgcagggtgacctgcgtgtccggaccgatacgctgttcagtcatttgccatttctctcgttttactgctacggaacatgtccagggccagcatcacagcgccaaccgtgatggcgctgtcggcgatgttgaacgctgggaaataccagcggttctgccaatgcaccagaatgaagtcgacgacgtgcccaagcacaatgcggtcatagaggttgccgagcgcgcctcccagcactaacgccagcgcgacggccagccagctttcgctgggcttcagccgcttcaaccagaccaccagtaccgcgctaacgccaacggcgatcgccgcaaacagccaacgctgccagccggagtgatcagcgaggaagctgaaagccgctcctgtgttataggcgagggtccaggcgaagtagtccgggatcacctcgaccttttggtacaggcggaagttggtttcgaagtagtgcttgctcgcctggtccaacacgatgaccagcacgctcaaccagagccacgccagcttgccgaaacgagcgctcatgcgaggcgcccttgcgccgaaagaccgaggccatcacgcatagtggcgaacctctccagcaccctcgatgttctccacacagcggccgcagatttccgggtgctcggcatgggtgcctacgtctggcaggtggtgccagcaacgcccgcacttggggttttcggttttggcgaccgatagtttcaggccggccacttcgctttcgaccgcatcggtaggtgcttcggcaagcggagcgacgcgtaccgccgaagtgatcaggacgaagcgcagctcgttacccagcctggccaggtcggctgccagtgcctcctcggcatacagcacgacctcggcctgcaggttgccaccgagggtcttggctgcgcgacgcgcctctagttccttgttgaccgcagccttgacggccatcaccttgtcccagaattcgcggccaagctcgacgtctgccggcagctgcgcaagcccctcataccaggtgttgagcatcacggactcgttgcgctcgcccggcaggtactgccagatttcatcggcagtgaacgagaggatcggcgcgatccagcgcaccagcgcttcggcgatgtgatacagcgccgtctgacaggagcgccgcggcaggctgtcggcgccggtggtgtactggcgatccttgatgatgtccagatagaagccgcccagctcctgcacacagaagttgtgcaccttctgatagacattccagaacttataggcgccgtaggcttcctcgatttcgcgctgcaacagcagggcgcggtcgatggcccagcggtccagggcgatcagctggtcgttcggcagcagatgctgcgccggatcgaagccgtctagattggagagcaggaagcgcgcggtgttgcgaatacggcgataggaatcggcgctgcgctgcaggatcaccttggaaaccgccatctcccccgagtagtcggtcgaggcgacccacaggcgcaggatatcggcacccagactatcggtgacttcctgtggcgctacgacgttgcccagcgatttggacatcttgcgaccgttctcgtcgacgacgaagccatgcgtcagcagccccttgtagggcgcgtggccgtcgattgccgaaccggtcagcagcgaggaatggaaccagccgcgatgctggtcggagccctcgagatagaggtccgcacgcggcccctgctcatgccccatcggatgcgagccacgcatcacgtgccaatgggtggtgccggaatcgaaccagacgtcgagggtgtcgctgatcttctcgtactgcgccgcttcgtcgcccagcaactcggctgcgtccagtttcgaccaagcctcgatgccgccctgctccacacgctgggcaaccgcctccatcagttcgacggtgcgcggatgcaggtcaccgctttccttgtgcaggaagaacgggatcggcacgccccaggtgcgctggcgcgagatgcaccagtccggacgcccggcgatcatcccgtgcaggcgcgcctggccccacgcaggaacgaattcggtctgttcgatggcgtccagcgcgcggcgacgcagcgagctgccgtcatgcgcgaccttgtccatgccgacgaaccactgcgccgtggcgcggtagatcagcggcgtcttgtgccgccagcaatgcatgtagctgtgctggatcgactcatgtttgagcagtgcacccacctcacgcagcttctcgacgatcgccgggttggccttccagatgaactggccgccaaagaacggcagatccgggacgtagacaccatggctctgaaccgggctgagaatgtcgtcattctccatgccgtagtgcttgcaggagcggaagtcgtcctcaccataggcaggcgccgaatgaacgataccggtaccggcgccggtttccacgtagtcggccagatagaccggcgagaaccgctcgtagaacggatggcagaagcggatgagctccagcgcacgcccctcgcagcgggcaatgatctcgccttgcagttcatagcgctgcaggcaggattcgaccagctcttcggcgagcaccagcagccggtcgccagtgtcgaccagcgcataaacgaaatcgggatggacgttcagcgcctggttggccggaatggtccagggcgtggtggtccagatgacgatgctggcgggcttggacagggccggcacaccgaaggcctcggccagcttgtctgcgtcctcgacctggaaggcgacgtcgatggcgtcggacttcttgtcctggtattcgacttccgcctcggccagtgccgagccgcagtcgaagcaccagttcaccggcttcaggcctttgaagacaaagcctccttcgaccatcttcgccaacgcgcggatttcgccggcttcgttggcaaagtccatggtgcggtaggggttgtcccactcaccgagcacgccgaggcggatgaagtcggccttctgcccttcgatctgctcggcggcgtaggcgcggcagcgctcgcgcgtcaggtcggcgggctgattcttgccgtaggtgatctcgaccttgtgctcgatcggcaggccatggcagtcccagcccggaacataaggcgcgtcgaacccggccagagtcttggagcggacaatgaaatccttgatgaccttgttcaccgcatggccgatatggatgctgccgttggcgtacggcgggccgtcatgcaggacgaacttcggacgaccttcgccaatctgccgcagcttcccgtacaggtcgatgctgttccagcgctgcagaatctccggctcgcgctgtggcagaccggccttcatcggaaatgccgtggacggcagattgagggtcgctttgtaatcggtcatttcagtcctgactcgtgataaagggtgaagcccgccagtattcgcgagctgcggcgatatccgcttcgatcgccgtcttgagtgcctccagcgaggcgaagcgctgctcgtcccgcagcttgtggtgaaaggtcacgcgtagccggcgcccataaaggtcgccctgatagtcgagcagatggacttccaggtgcggatggccatcgctttgcaccgacggtcgcaccccgatattagccacccctggctgcggccggccttccagctccgtactgaccatgaatacaccacttagcggtgtgctcttgcgcttgagctggatattcgcggtaggcgcaccgagctgacgacccagcgcctgcccgtgcagtacccggccggtaatgctgaacggccggcccagcagcttctccgccagcggcaaatccccagcggcaagcacctgacgcaaccgagtgctgctgacgcgctcgccatcgacctcgatggtggtggcggcctcgaccgtgaacccttctgcggcgccggccttcagcaggaaattgaaatcgccggcgcggtcacagccgaaccggaaatcatcacccacctccagatgccggacgccaagcccctcgaccagcgtcgcatggacgaactcggcggcgctgagctcgcgcaaacggcgattgaaggccaggcacagcaccagatcgacgccctgctcgtccaggagcaggagtttttcacgaagacgggtcagccgggcgggcgccttgtccggagcaaaatactcgcgtggctgtggctcgaaaataaccacgcagctgggcaggccgagatcggcggcgcgctcgcgaagacgcgccaggatggcctggtgcccccggtgaacaccgtcgaaattgccgatggtggcgacgcacccccgatgccggggccgcaggttatgaagacctcgaaccagctgcataccgcacttcttgattgaaaagtcgtcgattatacgcatgccccggcaatcacggacaggtttgccgccgcccctcggcgctgatcagtgacgaagatgccgcggccgcaaaccaagcaccaccagtcctgccgcgaaagccgccaacccggccagaatcagcaaactcaactgcagcgcgcgcgcttgccagccccaggcgaaccattctgcggacggcacgttgagccaccaaaccgcgcccaccatggcagcacaaccgccagccaggcgcagcaggagaatcccccagcccggcgccaaccggaacacaccgatgcggtacagcccccagaacagcaatcccgcgttgagcatcgacgacagcgacgtcgccagcgccagcccgacgtgctggagcggccagatcagtatcaggttcatcaccatattggcgatcatgcagatgattgcgacccgcacgggagtcttcaggtcctgacgggcgaagaagccgggcgccagaaccttgatcagcatgaacgccaatacgcccaacgaatatgcttcgagcgcattggccgattgcaccacggcctcctcggtcatggccccgtagaagaacaggctcgcgatcagcggctcggcaaggatacccagcgcgagtgccgcgggcaccccaaccagcaacaccatgcgcagcgcccagttgagcgtaccggaaaatgcctcgggatcgtcgccagcgtgctgtcgcgacaggcttggcaagatcaccgtaccgatggcgataccaaaggcgcccaggggcaactccgacaggcgatcggcatagtagagccacgatacgctgccggtctgcagaaacgaggcgagtacggtatcgagcaggagattgatctgactgaccgatacaccgaacagcgcagggaccatcagcagcatgattcgccgcacgccctcgtctccgaacctcacgcgcgggcgcggcaagagccccagcttcgcgacatagggcagttgaaaggccaactgagcgaatccggcaatgaacacaccccatgccagcgccatgatcggctgatcgaaataaggcgtaaggaagacggccgaagtgatcatgcacacgttcaacaacaccggggtgaagcccggcaccgcgaagtgtccataggtgttgagcacgcccgacgtgaaggcggtgagcgagatcaacaaaaggtaagggaaggtgatacgcagcagctcgccggccagttgcatcttcgccgggtcgtcatggaagcccggcgcaaacagcatcaccacgtaaggcgaggccagcacgcccagagccgtgataccggtcaaaatcagcccgagcatgcccgcggtgcggtcgaccagaagcttgacttcggcaagcgtccgcttggcccggtactcggacagcaccggcacgaacgcctgcgcgaaggcgccttcggcaaacaggcggcgcaggaaattggggatcttgaacgctatgaagaaggcgtcagccgacgcgccggagccgaagtagctcgccacgaccatatcgcgtaccatgcccagcacgcgggaaagcagcgtcatcacgctgaccaccgcgctggaacgcaacaatccgcctttaccggatgtctcggacatttgttttcctagaagttgctgcagaggttccggtcaggcacaggccaacggaatcgacgggcaattacgacagataaagaggccgcgagtttagcggcagcccttctgtccggccagcgtcatcaatcttcaggcaggcttgacaagcccgcgccgcatcggcatgattcgcggccttatttgctttgtaatcccacgttttcgaggagttcgacggtggccaacagcccttccgccaaaaaacgcgcaattcaggctgagaagcgtcgcagccacaacgccagcttgcgctccatggttcgtacctacatcaagaatgtggtcaaagccatcgacgcaaaagatctggaaaaagctcgtactgcttacaccgcagccgtgcctgtaatcgaccgcatggccgacaaaggcatcatccacaagaacaaagccgctcgtcacaagagccgcctgaatggccatatcaaggccctcggcgctgctgcctgagctgtacgttcttgaaaaaaaccggccttgagccggttttttatgcctacaaaaaggctggaggctggaggctggaggctggaggctggaggctggaggctggaggctggacagcatgggccatccacccggaaacacactatttttggcagcgcagaacctgaactttgctatcgcgcccagcctccagcgcctttatcggctttacagccttaccgcattacggccacggccgtaccggaatagcggtcaccgcgttctgcggactgccttcgatgacgcgatcgctgtagacgagatagaccaaggtattgcgcgcctcatcgaagaaacgcaccacctgcatcgtcttgaacaccagcgacgtccgctccttgaataccacctcgccatccttgagcttgtcgctcatgcggatcgggccgacctgacgacaggcgatcgacgcctccgcacgatcctccgcaagaccgaggccacccttgataccacccgttttcgcccgggaaagatagcaggtcacgccctcgaccttgggatcatcgaacgcctccacgacgatcttgtggttcggccccagccacttgaagaccgtatcgacctcacccacttcccgcgccatcccaaccaccggccaggccagcaacaccagcagcgctttagccagtcgcatcgagcacctcataccagaatcatgttgtcacgatgaatgagctcgggctcatcgacataaccaagcagcttttctatctcgtcggatgaatgccccaggatccgctgagtttccgcaacactgtaattcgccaggccgcgagccacttctcgcccgtcaggccctacacagaccaccatctcaccacgacggaacccaccctgcgcggccttcacgccgaccggcaacaagctgcgattaccctgcttcaacgcatgcaccgcgccagcatccagcgtgaccgagccacgcgtctgcaaatgcccggcgagccattgcttgcgcgccgcatggcgattgcgctcgggcgccagcagagtacccagctgctcacccgctttcagtcgcgccagcacctgctcgatacgcccgccggcaatgaccgtatgcgcacccgagcgagccgccaggcgcgccgcccgcaacttggtctgcataccgccacggccgagcgcaccacccactgcacccgccaccgcatccagcgctgggtcatcggcacgcgcttcactgatcagattggcgtcgggattgttacgcggatccgcatcgaacatcccatcgcgatccgtaaggatcaccagcaagtcggcctcgaccaggttcgcgaccagcgccgcaagggtgtcgttgtcaccgaagcggatctcgtcggtgaccacggtgtcgttttcgttgatgaccggcaccacgccgagatcgatgagcgtacgcagcgtgcttcgcgcattgagatagcgcttgcggtcggacagatcgtcatgggtcaccaggacctgcgcggtctgctggtcgcaacgaccgaagctggcctcccaggcgcgaatgagccccatctgccccaccgcagcggcggcctgcaactcatgaacggccttgggccgcaccgtccaaccgagccgactcatgccagcagccaccgcaccggacgacaccagcaccaactcaacgcctgcctgacgcaacgccaccatctggtcgacccagacggccattgccgcctggtcaagcccacgcccatcagcggtcagcagcgcactgccgatcttcaccacccagcgccgcgcgccgctcaccttgtcccgcatcgatcccgccttctatccggccaaaccactcggtgaactgcagacgaagcagcccaacgaccactcacccataggcacaactacgcgtacaaacctttagcggacgtagaagatttcagcgccgccttcgtcatcatcatcgtcgtcgaagtcatcgtcatccgcatcgacggccgccttgaccccggcacgacgcaacgcccgctgatcatcgagctcctgcagacgcgcacgcgcctcgtcctcgatctgctgatccagctcggcgagcgcttcggcataggcgggctcttcggcaatgcgcacagtgcgctcatccagataacgcatgatggcctgactcagcgcctcggtaccctcgctctccagcgcggagatcacgaataccggccccgtccactcgagacgctcgaccacctgacgaacccgctcctcacgatcctcctcgagcagctgatcggccttgttcaacaccagccagcgatcacgctgagccagcgccggactgaatttctccagctcgttgagaatgacctcagccgcatcggcaggatcgctctcgtcgagcggcgccatgtccaccagatgcagcaacaaacgcgtacgcgccaggtgcttgaggaagcgaatacccaaaccggcaccctcggatgcgccctcgatcagccctggaatgtccgcgatcacgaagctcttgtagcgcccgacactgaccacgccgaggttcggcaccagcgtggtgaacgggtaatcggcaaccttcggcttggcggccgataccgagcggatgaaggtgctcttgccagcattcggcaagcccagcagaccgacgtcagccagcaccttcagctccaacttcagatcccgcgcatcacccggtttgcccggcgtcgtctgccgcggcgcacgattggtgctcgacttgaagcgggtgttgcccaggccgtgccagccgccttgggcgaccaacagccgctgcccggccctggtcaggtcaccgattacatcctgggtggcggcatcgatcaccgtggtgccgaccggcaccggcaggatcaaatcctcgcccttggcaccggtgcactcggtactgccgcccttctggccgttcggcgcattgaagcggcgggtatagcgatagtcgaccagcgtattgaggttctcgtcggcctccagataaacggagccaccatcaccaccgtcacccccgttggggccgcccttctcgatgaacttctcgcgacgaaagctcatcatgccgttaccgccgtcaccggcctttacaaaaatcgatacttcatcgacgaatttcatgggaacgcctcccgccgcagggacgggctagaaaacaggaacataagggtcttgcaaaacccggcgaaaactagagcaaagcaatgttttgcaagagccctataaagcatacagaaacaaaaaagccccgtcgcatgacagggcttttccagcaacgccgcagttaggctgcgacgacgctcacgtagcgacgaccgaaagcgcccttcacttcgaacttgatcacgccttccactttcgcgaacagggtgtgatccttacccatgccaacgccgtaaccggcatggaactgggtgccgcgctgacgcacgatgatgttaccggccttgatggcctggccgccgtacatcttcacgccaagacgtttggcttctgagtcgcgaccgttgcgggtagaaccgccagcttttttgtgtgccatgagttcaatactcctgttaggggattcaggcccgattagccctgaataccggtgattttgacctcagtgaaccactgacggtggccctgacgcttcatgtggtgcttacgacggcggaatttgatgatgctgaccttgtcatgacgaccttgggcgatcacttcagcagtgaccttggcaccatcgaccaccggagcgccgattttgacatcgtcgccgttgccgatcagcagaacgcggtcaaaagtgactgcttcgccagtggcaacttcgagtttttcaatcttgaggtactcgccttcggcgaccttgtattgcttgccgccagtaacgataactgcgtacatctgtgtatctccgttgatcctgctcacccagcgcttaagtgaaatagttggtggctggcatggctgctcggggccggaagggacgcccttgcaattgcgtaaggcagggaaatgcccagggggaaagttcagggtccgcgattgtacgcatccaccaatgcctgcgcaatagccgcctggccttgccttgacagtgtctgacccgccccatagcatgccgcgcaatctccgaggagtactcgtccccgatgcaaccccaggccttttaccaagtagtggctgacgattttgccgccgttgacggcatcatccgcaaccaactgacttcccgcgtaccgctggtggaaaagatcggggactacatcacctcggccggcggcaagcgcctgcgccccctgctggtcctgctcagcggcaatgcgctgggtctcaaaggcgatcaattgcgcctgctggccgccatcatagagttcctgcacacctcgactctgctgcacgacgatgtggtcgacatgtctgggatgcgccgtggccgctccacggctaacgcgctatggggcaacgcccccagcgtactggtcggcgacttcctttatgcgcgctctttcgaaatgatggtcgacctgggctcgatgccggtcatgcgcatcatttcccaggccacgcgggtcatcgccgaaggcgaagtgctgcagctgtccaaggttcgtgacgccagcaccaccgaagaaatttacatggaagtcatccgcggcaagacagccatgctcttcgaagcctccacgcacagcgccgcgacgctggcgggtgccagtgagacgcagcgcgaggcgctccgtacattcggcgactacctgggcatcgcctttcagctggtcgatgatctgctcgattaccagggcgatgccgaaaccctcggcaagaacgtcggtgatgacctggccgaaggcaagccgacgctgccgctgatctacaccatgcgcgagggcacagcggaacaggccgcactggtgcgtaaggccattcagaagggcggcatcgaagatctcgaaagcattcgcaacgcggtagaggcctccggtgcccttgagtacaccgcccgcctggcgcgcgactatgctgatcgggcaatcgcctgcctggaactcattccggccaactgctatcgcgacgccctggtggaactcagccgtttcgctgtcgcccgcacccactgaactgccattaaagggtgcgcttgagcaccctactcaatgcccgctcaacctgcatgaacatcggtccgctcgccattgatcgccgctgagattttttgcgcttgcatctttgcaaataacaattattctcattaacgaaatcaactggaggcgaccatgacttatctgatcgatgcctggctggaccgaccacagccctacttgagaattcttgatcgcaacacgggtgccgtatgcgtttctctggagggagacgccctggacgagcttcgtgaccagggcgatctggacctgcaggagctgagcaccagcgaaccctgcgtgctcaaggaacaggtacgcaacctgttcctgttctcctatgcccgggcgttgcgcccgtagcggtccttacagaacagcgagcagttcgacgtcgaacaccagaacgctgtgcggcgggatactgccgacgccctgagcgccgtaggccagctcgctcggcacatagagccgccacttgctgcccacgcccatcaattgcagcgcctcggtccagccggcaatcacgccaccgactggaaactcggcaggctggccacgctggtaggagctgtcgaagacggtgccatcgatcagcgtgccgtgatagtgggtacgcacctggtcttcggcggtcggcttggcgccctcgcccgccgtcaggatttcgtactgcagccccgacgccagtgtggtcacaccgtctcgcttggcattctcggccagaaacgccttgccctcacccgccgcggcttccgccttgcgctgcgcttcagcctgcatgcgctcacggatcacagcgaagctggcgttcaggtcttccggactgacctggctggcgacactgccgaaggcgtcacgaatgccggcgatcacggcatccaggctgatgcccggtggcgggttctcgcgcaactggtcacccagctgacggccgatgccatagctcacgcgcgtttcgtcggtggataggttgaggtcggtcatgtctgggctccgctggaaaaaagggcgcacagcctagcacagcgacgaacagcccgataaagacaggccgacgtggaaacgcctatgtcgcgacccgtcgctaccaggccgaccgtaagctgatcggcacccgcagcggccgacgaacacctcggccagcccgcacatctcgtcgatcgagcggactgcttgtgtaggagtggcctctggccgcgaccgagctttccacgccgctgcaagtcgcaagcagagcttgctcctacagggcgcggggtgaagcggacggggcaccgcgccggcgttgggccggttgggctcgatcgagcggactacttgtgtaggagtggcgtctggccgcgaccgaggctttccgcgtggcggcaggtcgcaagcagagcttgctcctacagggggcttcggcgtgacgcgggtaaagcggacagggcaccgcgccggcgttggcgcctgttaggctctatcgagcggactgcttgtgtaggagtggcctctggccgcgaccgagcttttcgcgccgctgcaggtcgcaagcagagcttgctcctacagggggcttcggcgtggcgcgggtaaagcggacagggcaccgcgccggcgttggcgcctgttaggctcgatcgagcggactgcttgtgcaggagtggcgtctggccgcgacctaggctttccgcgtggcggcaggtcgcaagcagagcttgctcctacaggggcgcggggtgaagcggacaggtctccgtgtcggtgttgagccttgtaggctcgatcgagcggactgcttgtgtaggagtggcctctggccgcgaacgagctttccgcgtgacggcgggtcgcaagcagagcttgctcctacagggggcttcgacatggcgcggggtgaagcggacgggtcaccgcgccggcgttgagcctcgtaagctcgatcgagcggactgcttgtgtaggagtggcctctggccgcgaccgagcttttcgcgccgctgcaggtcgcgcgcagagcttgctcctacagggggcttcggcgtggcgccgatcaaaggtgctggtcacgcagcgaccgagccgtcggcgcgtcaatgcttggtgagcttgtccagatagcccatcgcaaaggcggagaaaacgaacgtcaggtggatgatcacgtaccacatcagctgctcgctctcgagctgctgggcatccatgaacatgcgcaacaggtggatggaagaaatcgccacgatcgaagccgcaaccttcatcttcagcgaaccggaatccatcttgcccagccagtcgagcttttccttgccttcgtcgacgttcagctgcgacacgaagttttcatagccggacaacatcaccatgaccaaaagaccacccaccagtgccatgtcgataagggaaagcaacctgaggatcaggtcgccctcgctcagcgagagcaccgaaggaagaatgtgccagatttcctgaaagaacttgatagccagcgccaacagcgcgaacgccaagccgaagtagataggcgccagcaaccagcgggcggcatacatgctgttctcgatgaagcgttccatctgttctcactgtggtgggaaggtcacggctggcgagtatacgcagcgcaacagagcgttcaacaaagccctgttgcaaggtattttcagtttgtggataagaatttcgaggcaacaccgggcgagaccggaaaaccaactgcaagccggtcaagccggaccatcgatcagggcctggactcccagccgccgagatagcgggcctggttggcattgaccttgcgcagctccgcctgcatgtgcagctgccagatagaaggagagtcggactcgccatagccctggccttgcagattactggctatggcctgcaacaccgattccgcctcgcgaggcccgtggaatggcccctgcgccttgatcgcggtgggttgcccagcgtcgagccccgcagcgcaaagcaaggtccataaaccattaccgcccgccagcggacggatcgtgcattcgatacgggtcaccagacccaagcactgacggttcagacaaagcgtgtgagacatgacggcgatcctcgcgctaggttgcgcgccgtcattcaggacgaatgagcggcaacccgtttatccacgaaacttgtggataaccatgtggatagggagtgaaaaacgctcctccactgcagacccgccgccgctcacatcgttccgtccgtttgttactcacccaagctcggctagttctgctcggtgcctttcgcagaggtgttcgccgacaccgcgccggccggcgtatcacctttgccatcctcttcgagctcgatctcggcgatgtcgcgcaagcgctccaccactcgcgcgttgacgctgcccttgggaaactgcccgtccttgtctgctgcgcctacgggttcacctaccaacaaggatagcgcttcatccacatggcgcacggcataaatgtggaagcgttcctggcgcacggcctccagcacccgctcgtcgagcatcagagtcgtgacgttggcgaaggggatgatcgcgccctgctcgcccgtcagtcctcgcgcctcgcaaaggcggaaaaagccttcaatcttttcattcacgccgccgactgcctgcacctcgccgaactgattgatcgagccggtaatggcgaagcactgcttgagcggggtgcgcgagatagccgagatcaacgcacaacactcgcccagcgaggcactgtcgccgtcgacgtaaccgtaggattgttccagcgcgatgctggcggagatttccagcggaaactcctgcgcatagcggctgccgaggaagcccgtcaggatcatcacacccttggagtgaatcggctggccgagattgacctcgcgctcgatatcgacaatccccgagccgcccggataaacggtggcggagatccgtgccggcatgccgaacgccgaatcgcccacctcgagcacggtcaagccgttgcacttgccgatggccgcaccttcgctgtcgatcagaatgacgccggcgaggatgtcttctaggatgcgtgccgagacgcggccggtgcgggtggccttggctttcagggcgcgctcgatatggccgacgtcggtgacctcgtccttggccagctggcgaatgaagtcagcctcgctgaccagctggaacagatcgccgatacgcgccgacagccgcccctgatgctcggccagccgcgcgctgtacgtcgccaggcgagccactgcagccgccgtgagcggcgccatgccctcctccgaggtccgcgttttcattagctgggcaaactgctcgaggctgtcctcggccaggggaatttcctcgtcgaaatccaccagcacacggaacatctcctggaagtccggatcgagatcctgcagcgtgtagtacagctgccgcgagccgatgatcaccaccttgacgttgagcgggatgacctccggattcagcgtgaccgtcgccaggcgacccagctcggccagcggcgactccattttcagacgccgcgattgcaaggcgcgcttgagcgcttcccagacgaagggctcgctgagcatcttttccgcttccagcatcaggaagccgccattggcacgatgcagcgcgccgggacgcagctggcgatagctggtgtagagcgcgccctgatcggtgctgtattcgatacgaccgaacaggttgtcgtaggtcgggtgcggctcaaagacgaccggcgcgcccccgtcaagcggatgaccgaccaccaggcttgggctgtactgttcttcaagaagctgtcgggtctgggcatcgggacggttttcgtcgaccagctgctcgaccaccgtcttcagcaggttgacttgaaccgcttgcagataggcttcgatgccggcgttctcgccgtacttttccgagagtggcgccagcagcggctgcaacgcctggctgatggtttcgtcattgagctggcgcagttggttgctcgactcgcgcttccacagcggcaggctggccagcccctcgttcaggtgcacttcgagggcggaaatgtcctcgtgatagcgctcgcgctcggcttccggcagctgggcgaattccgcttcgtccatcgatttgccgtccttcatcggggtgaaggcgatgttgctgctgtcgcggtacagcgcgatgtccttttccagtgccagcttttcgatgacgtccaacgctttgtcgtagcgttggttgaaggcgcggtcgatagcgctcttcttctgctggaagctcgggtgctcgaatacggccgggaaggtcgccatgaggttgtcgatcagctgaccgatgtcggcgatgaactccgcggcgcccccctgcggcagctccactacacgcggttcacgcggctcgtcgaagttgttcacgtagacccagtccgaaggcgttgccagacgcttgccttcggctttcaggtaacgccgcacgaacgagaaacgcccggtacccggctcgcccatcacgtatacgttatagccgggacgcggcattgccacgccgaactgcaaggcttctaccgcgcgctcctggccgagcacaccgagaaaaggctccagctcatcagtggtcttgaagtcgaattgactgggttcgaagggacgggtcagcgcttcgggcgccaggcgcaagccggtagcgacggtttcgggcattggggatccttgctgaggtggccgtggggccacgagtgatgccgccattctggcgttgcccatgccagcctgcaagattcaggacgcctccccgacgggcatcgctgcccctggatcggacaccaccgcctgcgcagaccattcaggctagatcgatgaacgggcaggcgatgcgaatcgacgcgcctgatgctcttgctcccaccccgagcaaacgctaacgccacacccgccagcttgtccggccccccccctttctggcgctgaacaccgcgccgctttgcttcggcgtacccgaccgaacgccaggtcgccgctaagcaagccgcggtatcggcgccgcccaacgaacgagccgttgtcttggcgtcgctagcgcacctcgatacctcgtcccaggcggcgccccgtcagacgtcgttgcgcgcgcgcaacgcatcgcgaatctcggtcagcaatacttcttccttgctcggtgccggcggcgcggatggcgcctccgcttccttgcgtttgaggtgattgatgcctttgaccgcgaggaagattgcaaacgcgacgatggtgaagtcgaacaccgtctggatgaaacgcccatagctgagggtgaccgccggcgtatcgccgaccgcctgcttgagcacgatggcgaggtcggagaagtcgacaccaccgatcaacaagcccagcggcggcgtcaccacatcggcgacgaacgacgagacgatcttggtaaaggcggcgccgacgatgataccgacggccatatcgatgacgttgcctcgaacggcgaacgccttgaactcattgagcatacccatctgtgctttcccttttgtcagtggagaattcaggatcggaaattcgccgcagcgcttcgacctgtgcagcataggcggggttcaagcggcgagccagagaggctactcgatgaacggggcgcgtcgatgacaacggcttgatcgccgtcaaaagcgatccgaggtggcggcgctaaggtacagctcctcttcacccatctggagcgccaccatgcacgtcgaacaccatcccctgaccagggacttccccgagaaacgcgagcagctccagttgctgcgccagcaggaccccgcctttgcgcgcaaggccgagcaatacgaagccctggacaagcagatctgccgggtagaagacggcgtcgaaactctcgatggcgacgcgttgagtgctctaaagctggagcgcgtcacgctcaaggatgccatcgcccgtgacctgaagcgtgccggcggcagctgctgtggcggttgctgcggctaagcggcatacagcgacaggacgggcatctgcaacggatgcccgtcgcgcgctccgcgggtcatccagccaggcccggcgaatggcgccatgccggcgcgatcctcagctcgccctgctcagaacaacccaccgaagcggaaaccggcacccacccagacaaaggccaccgccgtcagcgtgatcaggacgatatgcactcccagctgcgatagccgctgcgcatcgagcttggggatgatcgccagccgagcatgtacgcccaaaagcgcagtgaaggccagaagcgccagcttggcctggatcagatgcgcgatgggcgagtcaccgaaccattgggcgtgcggcagccactgccccgccagccatatgccggttgcgatctgcagcagcaaggccggaatcccgacccgctcatagagcgcttcgaatgtacgcaccggctgcacgtcgcggcgacgcagcgcaccgggcagtacgctgagcagcaacaccagatgcccgccgacccagacgctggcgccgagaagatgcaggaacaacatgtagcgcatggggcgactcctgttcgatttgtttacagtctggcggctctgaaggcgcttgtggctgatggcgatcaagtcagccgctatcatgcgactccactcatccgacgcggagttccccatggccaaggccaagcgcatgtatggctgcaccgaatgtggctcgacctttcccaaatgggcaggccaatgcggtgactgtggcgcctggaacacgctggtcgaaaccgtgatcgacggcgccgcccccccgtccgggcgcgccggctgggcgggcggtcaggccaacatcaagaccctggccgaagtcagcgtcgaggaagtgccccgtttctcgacggcttccggcgagctggaccgcgtactcggcggcggcctggtcgacggctcggtggtgctgatcggcggcgaccctggcatcggcaagtcgaccatcctgctgcagacgctgtgcaacgtggctcgccagtttcccgcgctttacgtcaccggcgaagaatcgcagcagcaggtggccatgcgcgcgcgacgcctggacctgccgcaggatcggctcaaggtgatgaccgaaacctgcatcgaatcgatcattgccaccgcccgcctggaaaagcccaaggtgatggtgatcgactcgatccagaccatcttcaccgagcaactgcaatcggcgccgggcggggtcgctcaggtacgcgaaagcgcggcattgctggtgcgtttcgccaagcagagcggcacggcgatcttcctggtcggccacgtcaccaaggaaggtgcgctggccgggccgcgcgtgctcgagcacatggtcgacaccgtgctgtatttcgagggggaatcggatgggcgcctgcgcctgctgcgtgcggtgaagaaccgcttcggcgccatcaacgaactgggcgtgttcggcatgaccgacaagggcctcaaggaagtcaccaacccctcggcgatcttcctcacccgcgcgcaggaagcggtgcctggcagcgtggtgatggccacctgggaaggcacccgaccgatgctcgtggaggtgcaggcgctggtcgataccagccacatggccaacccgcggcgcgtcaccctggggctcgaccagaaccgcctggccatgctgctggccgtgctgcatcgccacggcggcatcccgacctacgatcaggacgtgttcatcaacgtggttggcggggtgaaagtgctcgagacggcctcggacctggcgctgatggcagctgtgatatccagcctgcgcaaccggccgctggataccgatctgctggtcttcggcgaggtcggcctgtccggggaaatccgcccggtcccgagcggccaggagcggctgaaggaagccgccaagcatggtttcaagcgggccatcgtgcccaagggcaatgcacccaaggaagcacccgccgggttgcaggtcatcgcggtgacgcgcctcgaacaggcgctggatgcgttgttcgaatagtccgcgtggtcagggctcgccgagcgccgccagttcgcgctccagcaacgcttcgtcaccgagattgagctcgaccagccgccgcaggtgagtgatggaaaccacgtcgatgtgccggcacaccaggccaaccagttccccttcgctatgggacatctcgacctgcatgcgcacctcggcgtcgtcggccagctgtatccgtgcttcgaatggctgactgggatcggcgtcccagtccttcggccgatgcaccagcagccctttcagggaaaggtcgtgcaactcgaccggccagcggcgcgcgccctgctccagctccgtttccgcatcgaaggcgatgcgctggaaccgtcgacgatcgctgtttgtttcgctcattgggatcactccgggaaatttccgtttaactataggccaccctggctgcggccggcttacagccagcgccgtacccgccgccggtaggtccgatactcgtcgtcgaacaatcgcgtgagcagatgttcttcatgcacgatcacggcgcgctgcatgcagtagatcagcagcggcagcagcaaccagggccagagactgtccagcaacacccccacgccgcagtagatcagggtgcctgccaggtagatcgggttgcgcgagaagccgaacgggcccgtctgcaacaggctgcttggccttccgtaagggttgatggtggtgcgatggcggagcatctcccaggccgcccaaagcatcagcaggacgccaagggcgatcgcggtccaacccgcgtacgcgaccagttcgtgcgggggcaaatcgagcggcgcccaccgggccaaggcccaggcgcaaccgatgaatgccaggtagaccagcggcggtggcgggatcggtccgacagatttggcaggcatgggcgcatccagatggagagggatgaacagtgcgacccgcgagcgcgacactgccctcggtgatcgacgtatcgaacagcagccggtttgaacccgaaagtggacgttagtgctgtcccggtagccagccatgcaccatcgcgtgcttcatcaggtcggccggccggtcgatgtcgagcttgcgacgaatgctcagacggtgggtttccacggtccgcacgctgatctgcagcgcacgcgccatggtcttgttgttgtgcccctgagcgagcatcagcaggacttcccgctcgcgaggggtcagctcgcgctcctcggcgctgtggttggccagcttctcggcaaccccctcgctgtaataggtgccgccagcggcgatggcttcgatcgcgacgatgatctcgcgtgacggcgcatccttgagcacgtaaccacgggcgccgaccttcaccgaggtgttcacgtactcctggttgtcgtacatgctcaggataagcacacgaatatccggaaagtcgcggcgcaacgactgggtcagctcgaggccgttgatatccttcagcccgatgtccatcagcacgacgtcggctggcacacgcctgagcaggtcgaaggcttcggcgccgctgccggcttcgccgaccacgtccagttcgggtacggccatcagcagtgcgcggatgccgtcccgaaccaacgcatggtcgtcgatcagtaccaccttgatatgtgcttgcgggttcattgagcgagcctcttgttgtcgtcgacagaagtcagccggtgtgcgccggcaaggtcacgtccagctcggtgccgccggcttcggacgccagattgaagcgccctccgaagtgctccacccgctcgcggatgttgcgcaaaccgatgccgccgcccttgatgctatcgagcttgcgcggattgaagccgacgccatcgtcgcgcacccgcaagcgcaccgaaacgccatcaccgtccaggctgatacgaacctggcgtgcgccagcgtgacgctcgatattggtcagagcttcctgcagcacgcggaacagcgccaccgccaccgagtcgtcgggcgctccgtcaccgaggttattggtgtatcgcatcgtcaggccgctgcgctgcccgaactcggcgacaagctggccaatggccgccgaaagcccaagggtatcaagcaatgaaggatgcaggtcatgggagattcgtcgcacttcgccgatggcgccagccagccgctcgacgcccgtatcgagggtggtctgcgccttgggattgccgctggccagttcgtggctggccagctcgaactgaaacttgatcgacaccagcagctggctgatgccgtcatgcagctcccgggaaacgcgcgagcgctcctcctcctgcaggctgacgatacgctgagtcaatgattgcaacttgcggtcagccagccgccgctcgctgacgttcaaggtcaggccgctggcgaacaccagcagcaccgcgaccagcgccaccccggcgatcgccagcatcgtggtatgaatgccactggagacttcgttgcgcacgttcaggatcgcctgatcgacgtcctcgagataaagcccggtgcccagcatccagccccagcgttcgagcatcaccacgtaggcgagcttggccgcgaactgcccggtagacggcttttgccaggtatagcgctggaagccgtcaccggtctgcgcgctgcgcatcagcgcctggatcacgggcaggccgttcggatccgtcatgttccagaggtcctggccgaccagttcgctctgacgcggatgcatcaaactgcgcccgctgcggtcgtagacgaaaaaatagccatcgctgccgaagctgaaacggcctagcgcggccaacaccttctgcttggtctcatcgtcatccaggccgctgtcgtagagcggcgcgatgatgctggtggccatctccacgtagttcttcaactccgcctgcttgctcgccaggatgctggcctcgatcagttgcgcctgctgttcgccgagccgctggttctgcacgatgaccagcgcgcagacgaccgccacggccagcagcaatggcaggatgctgagtgcggcgatcttgtgcttgagctgcatcgagcccctccgaatcaaggaaacatcaggcggcggagcgaaggtgctcggacctgaattgcatccgcgtcgcgacctcgcaggacgcctgggcaaaaacgaaaaagcccggcaatggccgggctttcgctgctgctgtcgtgtttagttaccgtagaccgggaacttggcgcagatcgcctcgaccttgccgcgcacggtctcgatcaccgactcgtcgcccatgttgtcgagaatgtcgcagatccagctggccaggtcgcggcactcggtctcgccgaagccacgcgtggtcactgccggcgtaccgatgcgcagaccggaggtgacgaagggcgagcgcggatcgttcggcacgctgttcttgttcacggtgatgtgagcgcgacccagagcggcgtcggcatcctttccggtgacgtcctgcttgatcaggctgagcaggaacagatggttctgggtgccgccggagacaacgtcgaagccgcgctgaatgaacacctcggccatggcctgggcattcttcaccacctgctgctgataagccttgaactcgggctgcagggcttccttgaagcacaccgccttggcggcgatgacgtgctcaagcgggccgccctgggcgccggggaacacggccgagttcagcttcttctcgatctcggcattggcacgggcaaggatcaggccaccgcgcggaccacgcagggtcttgtgggtggtggtggtgacgacgtcagcgaacggcaccgggttcgggtagacgcccgcggcgaccagaccagctacgtgcgccatgtcgacaaacaggtaggcaccgaccttgtcggcaatttcgcggaaacgggcgaaatccagcttctgcgaataggcggagaaaccggcaacgatcatcttcggcttgtgctcgagagccagacgctcgacttcgtcgtaatcgatcaggccctgatcgttgatgccgtactgcacggcgttgtacagcttgccggaggaggaaacgctggcaccgtgggtcaggtggccaccgtgggccaggctcatgccgaggatggtgtcgccagcgttgagcagcgccaggtagaccgcgctgttggcttgcgaaccggcatgcggctggacgttggcgtagtcggcgccgaacagctccttggcgcgatcgatggccagttgctcgaccacgtcgacgtactcgcaaccgccgtagtagcgcttgcccggatagccttcggcgtacttgttggtgagcaccgaaccctgggcttccatcaccgccgggctggtgtagttctccgaggcgatcagctcgatatggtcttcctggcgcttggcttcctgctgcatggcagcgaagagatcggcgtcgaaacgggcgagggtcaaatcacggctgaacatggcagtcctcagagtcagctggcggtaaaaagcgagccgcagattctacctcatccgaaaaaatgcgggtatgaggcttggtcatacgcaacgtgaaggcattggcaggcgtagccggcgccacgctccggctgcctctggcgaccttgcggtgcggctcatcggctcggcgtccgggcctggtagccggaaacgacctcacccaggcgatccgccggcatcggccggccaagatagaacccctgcacttcgtcgcagccatgcgcctgaaggaaatccagctgcggccggttttccacgccttcggcgatcaccgacagccccaggctgtgcgccatggcgatgatcgcacgggcgatctggccgtcctgctcgccttcgggcagcccgtcgacgaagctgcggtcgattttcagcacgtcgatgggaaactgcttgaggtagttcagcgaggaatagccggtgccgaaatcatcgatggcgatcgacggcccgagccgcttgagcgaatcgagcgtacgcagcgcctcgcccacgtcctgcataagaatgctttcggtcagctccagctcgaggcgagccggcgtgatgccgctcgaagcgaggatggcggcgatacgctgaccgagctgaccgtcggcgaactgccgggccgaaagattcaccgcgaccttcggcaccctgaggccttctcgctcccaggccaggagctggcggcaggcctctgcgagcacccagtcaccgacctcgaccaccaatcccaactcctccagcaccgggatgaacgccgccggtgacaccaggccacgagtcggatgctgccagcgcaacagggcctcgacgccagtcagggtccggccatcggcgagcagctgcggctgataatgcagcgtgaactgttgctgctcgagggcatggcgcaggtcgctttcgagttccagtcgctccagcgcgctggcgttcatctcggcctgatagaactgaaagttgttcttgccgcgctccttggcgtggtacatcgccgtgtcggcattcttcatcagctggctgaggtcgtcgccgtcctgcgggctgagtgcgataccgatgctggccgtaacgaagaattcacgccccgacagcacgaacggctcgctcaggctggccagtacgcgttcgccgacgtgaatggcacgcttgagggcctcgtcgcgatcattgcccggatgcaacagaaaggtgaactcgtcgccgcccatgcgcgccaccgtatcgtccgcgtcgacacaggacgccagccgcatggcgacctccttgagcattcgatcgccggcggcatgaccgagcgagtcgttgatcggcttgaagcggtccaggtcgaggaacatcagcacgacccagctcccacgccgcgccgccagttgcaggctgctgtacagccggtcctggaacagggtgcggttggggagttgggtcaggctgtcgtagtacgccaggcgatggatgcgcttctcgctggccttgcgctcgctcatgtcgctgaagaagcagacatagctgaccagctcatgctcggcgtcgcgcaccgcggtgataccgacccagcacggataggtgtcgccgtccttgcgcttgagccaaaactcaccctcccaggtcccggtatccaatatctggtcgcggacgaaggtcatctggttggcttgctggcggtcagcactcagcgtcattggcagcttgcccagcatttcgtcgcagccatagccggtaatacgctggaatgccgcgttgacctggacgatgcgcccctccgggtcggtgaccacgatcgccgcggtggaatggtcgaacaccgtcgcggcgcggcgcagctccgtttcggcctggcgctgctgactgacgtcacggccgatgcacagggtgccatcgaaacggttgtgttcatcccagatcaaggtgatgcgcaactcgatagccaccgggcgcccgtccgcggcgcgacagtcgaaatagagggtttcgccttgcaggctctggccgagctcggccagcgcagccggggtggcggaggccttgcgcacccggcgcatcaattcatagaagcgcgccgcctggcgcggcttcgtcaccacccggtcgaggccgtggcgcagcgcccagtcctggctgtaaccgagcacagtctgaatggagggcccaacgtaatcgatacgcaccgagctgtcggtggtgaaaatgacatcctgcaggctgcccgccagcatgcgatagcggcgctcactggcacgcagcgaatggctgtgctcgatgttggcggtgacatcacgggctacgccgatgacgcgccagatcctcccttgctcgtcgcgtgacaagacccgctcgcagagactgaaccagcgccagctgccgtcgcgatgccgccagcgcaacagcgcctcctgccccacgccctcgcgcatcgagccgcgcaaggccagcaagcgccagatgtactcctgatcgtcggggtggctgatgttccgccagaaggcattgccgtcgtcgccgcgctccgcctcgctgtaacccagccgcgaggccagattgctgttgctgtagaccagcttgccactttgcaggtcctgcacatatagagtgtcgggtaccgcccggagcacctcggaccagaagcgctcgcgctccaccagcgccgtttgcgccgctcgctcacgggtgacgtcgcgcatgacccagacgaagcaggacgggtgcgtttcgccccccagacgcagcgcaccgcgagctatggaaaacagacgggactcgccaccctgcagcaaacgtacgggcggaaggcagacatcggttgcctgatcgacatcgaaggcctgcggatcgagcgcaggcagcaattcctgcagccgatagcgcgacacctgctgaccgcccagaccgaacatcctctgcgcctggctgttcaggtattgcagccggccggagaaatcgctgatgagaacgcgctcgtcgatggcatccagggcagcgatcgaataacgcagcgcttgccaacgaggctcgaagcgtctgggcaacaggcgagcgcataaccgagcaaacagtcggacaagcggggccaagccttcgaaacgggacgcctgcagctgagaagaattgtcatcggtcaaaactgtcggacctgtgcgagagggcgacaacagccctgcggcgtgtgcgtgaacagggctaagcatgccctgactggaggcgaaacgccaccatcgaatacgctgccgctggtttgccctgcctggcgcattccggtagctttgccggattgtctggctcgtccgccacgacgggttttcctcctctttttcttcgtcacgggcattcgtctccatggctcaatacgtctataccatgcaccggctgagcaaagtcgttccgccgaagcgtgaaatcctcaagaacatttccctgtccttttttccgggcgccaagatcggcgtgctcggcctcaacggcgcgggcaagtccacgctgctgagaatcatggccggcgtcgacaaggagttcgacggcgaagcccgggccatgcccgacctgaatgtcggctacctgccgcaggaaccacagctcgatccgagcaagaccgttcgcgaagtcgtcgaagaagcggtcagcagcatcaaggacgcccaggcacgtctggacgaagtctacgccgcctatgccgaacccgacgccgacttcgacaagctggccgccgagcaggccaagctcgaagccatcctccaggccagcgacggccataacctggagcgtcagctggaagtcgccgccgacgccctgcgcctgccgccatgggaggcgaaggtcgaacacctgtccggtggtgagaagcgccgcgtcgcgctgtgccgtctgttgctgtctgcaccggacatgctgctgctggacgagccgaccaaccacctggacgccgactcggtggcctggctggagcacttccttcacgacttccccggcaccgtggtggcgatcacccacgaccgctacttcctcgacaacgtcgccggctggatcctcgaactcgaccgtggcgcgggcatcccttacgagggcaactattccggctggctggaagccaaatccaaccgcctggcgcaggaatccaagcagcagtcggcccatgaaaaggccatgaaggaagagctggagtgggtgcgcaagggcgccaaggcccgccaggccaagtccaaggcacgcctgcagcgcttcgaggaactgcaatcgcaggaattccagaagcgtagcgagaccaacgaaatctacatcccggccggaccgcgcctgggcgacaaggtcatcgattttaacaacgtgaccaagggctacggcgaccgcgtcctcatcgacaacctctcgttcagcatgcccaagggcgccatcgtcggcgtgatcggcggcaacggcgcgggcaagtcgacgctgttccgcatgatcatgggcaaggagcagccggattcgggcagcatcgagatcggcgataccgtgcaggtggcatgcgtcgaccagagccgtgaagacctggacggcagcaagacggtgtgggaagcagtgtccgatggctccgacatgatccgcatcggcaactacgaggtcccttcgcgcacctacgtcgggcgtttcaacttcaagggcggcgaccagcagaagttcgtcaaggacctgtccggtggtgagcgtggccgtctgcacctggcattgacgctgaaggaaggcgccaacgtactgctgctcgacgaaccgtccaacgacctcgacgtggaaacgctgcgctcgctggaagaggcgctgctggacttcccaggcgcggccatcgtcatctcccacgaccgctggttcctcgaccgcgtcgccacccacatcctctcctacgaggacaacggcgacatcgtcttcttcgaaggcaactacaccgagtacgaagccgatcgcaagaagcgtcttggcgatgcggcatctcagccgcaccgggtcaaatacaagaagctcgcgcagtagcaacgacccacaacggagccgcaaaggctccgtttttacgtgacgaatcgcctctggtggccaatggctagatgccggataatcgcgcgcctcgagagcggacacgccaatgcggagcgcccgcagaggccttgcgataggaagggataggcaccgatatggcagcactgggcttacgcggcaaatccttgctggtgctattgctgaccttcctgcttgccatcggcgtgacagcgctggttgggcatgaagccctgcaaggcgttcaacaccgcttcggtgaggcctacgcgcgcaacgtggtgcagctcaaccgtgagcggcttttcgcaccggtcacgcgcgaactggccctggcccagcgactggccgaatcgcagatcacccgctcctggctactcgacgaagacgacgccgcccgccgcgagctgttcttccgcgaagccgccggctatcagcaggcgctcagcgatcactcctacttcgccgcgtcagccacgaccggtcgctactactccaacggcggccagcagccgcccagcgagctgccgcggtatgtgatgaagcccgacgagcccgatgacgagtggttctacgtcacgctgcgttcggatgcgccctaccacctgaacgtggaccgctcggccgtcaccggggacctgaagatctggttcaacatcgtcgcccgcgacggcgaccgcccccttggcgtcgtcggttcgggcatcagcctgaaggccttcgtcacccagttcatcgaagaggacaagaccggcgtcgaatcgatggtgctggacagtttcggctcgatcctggtccaccccaacccgaaccttgtcacgctcaacgccgatacgtcgcaaggccgctcgctgtccaccaacctgcttggcctgctcgatgacatcgaacaggcccaggcgctacgccaggcgatggcctacagccgggaacatcctggcgagacggccaccctggaggcgagcctcgatggcgagccgcgcctgctggccctggcctggattccggaactgcaatggttcgtcgccagcgccgtcgatctgcggaccgcccaggtcatcgaactggagccattgctgccggcactcggcgccgttctgttgctgctcgcggtgctgatcgtcgtgggcgcctggctggtcgacaaacgcttgctgcgcccgttgcggcagttgcgcaaaagcgctcaggcgatcgccgccgggcaatacgaaacgccgcttccgcttcatcgcgacgacgagatcggcgagctgagcgccgcgttcagcagcatggcgcagcaggttcgcagtcataccaacgagctggagcgcagggttcaggagcgtacgcacgctctggagcaggccaatcgggaaatggccgcggcgcacaagaagatcgacgattcgatcgactacgccagcctgatccagcatgccatcctgcccaagcgccagctggtcgccgatctcgatgatcgccacgcggtgctctggcacccgcgcgatgtggtcggcggcgacttctacgtctatcgcgccaccgcccagggctgcctgctcggcgtggtcgactgcgccggccatggcgtacccggcgcactgatgacgatgctcgcccatgccgcgatcgaacaggcgatttccgatgccggcctggacgacccggccgcgatcctggtgcgcaccgacagcatcgtgcgcaggatgctgcgcgacgacggcacgcagcatgccctggccaccaacatggacgtgggccttgcctacgtcgacttcgagcgccgtcgcgtgagctacgccggtgccaagatcgcgctctactacagcgatggtgagcgtctggatgaactgccagccggccgccgcgcggtcggtgaccgccgcatcggcgagtaccagaatgccgaggtcgaactgaaaccggggcgcaccttctatctggccaccgacggcttcctcgatcaggccggcggcgaactaggctatggcttcggtaacagtcgcttcgccgaaatgatcctgcgtcacgcccgcctgccgctggccgagcaaggcgccgcgttcagagcgaccctggccgaataccagggcgattacccccagcgtgacgacatcaccatgttgtgtttccgtttcgattgagcgccatccaccagagtcgagttgccccatggaaaatcttgacctcttcgccatgcgcgaaagctacaacagacagcagatcatgctctgcttcaacggtccgatctcgcgcagcctgatcgaggaaataggtaacgcgctacgcaactacctggcggccgatcatgccaacccgtcgtcggccatggacgtgttcgccgtctatatcgagatgacccagaacatccgccactacgcgaaggtccgaaactgggccgaccaggaagccggcgccacggtcgtggtcgcccgcaacgacagcgacggccgctatgtggtatcggccggtaacctgatcgaaacggcggacggcgaagccctgatcgcggccatcgacgagctggcgaagctggacaaagcccagctcaaggccaggtacaaagaacaattgcgcaagccacgcgaagacaacaccgtcagcggagccggactgggcctgatcgacatcgcccgtaaatccagcgagccgctcaaggcctcgctgcaaaccgttgccaacggccgctcgttcatcagcctgagcgcggtcatctgacttacaagagccaaatgcacatgaatgatttttcaattgccggcagccagtcatcgcctgccatccaatccgattgggccaacggcgtgctcagcatgcagggcgattcctaccccgaaaattcctacgaactcttccaccaggtcatcgagtggatcgagcgttacctgaccgaggcgggtcgcccgctacgcctggagctgcatctgctgtacctcaacaccagcagcatcaaggcggtgatggacatcttcgacctgctcgaagcggcccatcaggaaggcaagccggtcgcagtcaactggcattacgatcggcgcaacgagcgtgtggtagagctggccgaggaattcaaggaagactgcacctttccattcatgatcctcagcgacgagtagaagcctgtatgcgcggccaaacgcctctggaaaaccaggtcatggagtcgctgtcagacccagagaaccaggatcatccgctgcacgaaacgctgagccagctgtgggaagcgcaccacaatctgctcaaccggatcgagcggatcgcccgcgtctccgacggctatcagagcatcgtccgggaccgcgagatgacgctttcggcgcgcttcgacaagcagttgcggcagctggaaaaggtcgcccgtatctccgatcgctaccagatgatgatgcgtgacctgaacatcgcgctgaaagaggcttctacccacgatgcgctgaccggcattgccaatcgccgtctgctcaccgagcgcctgcgcgacgaaaccgagcgggccaagcgttattcgcgcccgctgtgcatcgtcatgatcgatatcgaccggttcaagatcatcaacgaccaatacggccacgaagtgggcgaccacgtgttgatggacgtggtgcgagtgatggaagcggaaatccgcgagcatgatctgtgcggtcgctggggcggcgaggaattcctggtactgatgcccgagaccagcggcgatcaggccgtgacggtgatggagcggctacggcaggcagtcgccaagttgcgagtccggatcaacgacgattcgctgtcggtgactgtgagtctgggcatggcggaactgcgagccggagaaaactattccaccgccatcaaccgcgccgacgtggccttgctgcgcgccaagcgcaacggccgcgatcgctacgaactggccgactgagcgtcagcggttcgtctcgcgcagcggcagacgctcgacaatcgcctcgacgatctgctcgggcgcgggccggatgtccacccgaatagcctcgtcctcgccgggttgttccagcgtctgcaactgactgcgcagcaggctggggtcgaagaagtgcccgccgcgccgggccagtcgctccagcagcaaggcctcggagccgtccagatagacccagaacacgttctcgtcatcgccaccgagcatctggcgatagcgacgcttgagcgccgaacaggcaaaaatccagtcatggccctgctcgcgccgtgcctcgatcgccgcacgcatcgcctgtagccagggccggcggtcttcgtcgtcgaggggaataccgctggccatcttctgcttgttggcgtcgctgtgaaattcgtcggcatcggagaagccccaccccagccgggcggccagcttctggcctatggtggttttgccgctgccggcgacacccatgatgatgacgatcactggcaccttcttcattgtgcgatcggtgttcgaacgcgaggaccatgtcacccgcgacgccattggcgcctgtgcgggagccttgcagttccattcttcggtcacgggcgtgttccgaagttcctcgcggcgagggatggctggcggagcgggcgaatcggccgcgtgacggcgcgtgagcgacagtttcgccgccccaaaaaaaaggcggcgcaccgtctgcaggtgcgccgcccgacttcgaacgactagcggatcactggttgatctgcttcagatagctggccggttcggcgccgaggttgttcagcatgcgctcgctgtaccagtcgatgaagttgaccacaccgaactcgtaggtcttcgaataaggccccggctgataggccgtcgagttgatcccgcgctggttctcttcagccaggcgccggtcctggtcgttggtcgcgtcccacacctggcgcaggcgcgccacgtcgtagtcgacgccttcgaccgcgtccttgtgcacgatccacttggtggtgaccatggtttcctgagcgctgatcggccacacggtgaagacgatgatgtgatcgcccatgcagtggttccaggaatgcggcagatgcaggatgcgcatcgagcccagatccgggtcggtgatgcggcccatgagcttctggcagccctgcttgccgtccatcgtcattgacacggtgcctttgagcagcggcatgcggacgatacggttacgcaagccgaagctggcatgggcgtacggaatgttgttcttgtcccaacgagtggtgcactcggcaacctgatccttgaaggcctggctggcgcgcgggtcagtgacgtcatcccattcgagcagggtgttcagcagttccgggtgcgatccattgcagtggtagcactcgcggttgttttccagcaccagcttccagttggccttttccaccagggtgctctgcacggccaccttggcgttttccatatcgtacggttccatgtagtgcgacagggtcgccaggaagtcgtcgatcgctggagggttttcggccagggaaatgaaaatgtagccgccagccgtcttgcactgcaccggcttgaggccgtactggttcatgtcgaagtcggcgcccatctcggtgccggcgaacagcaggcggccgtccagttcgtaggtccactgatggtagggacataccagtttggccaccttgcccttgtcgctggtgcacagccgcgaaccacggtggcggcaaacgttgtggaacgcatgcacggtgccttcggcgccacggatgaccaggatcggattcttgccgatctgcagggtgaggaagttgcccttcgccggaatctcgcaggtcatgcctgcaatcagccattccttgtggaagatctcctgcatgtcgatctcgaacagcctttcgtcgctgtagaacggctgtgcaagggaaaaactcggctggcgcgtctgcagcatttctgccgtggccttacgtgcggcttcgagcggatcgcccaggctcagattggaagtgacatccatcggttgctcctcaagccggccgcgccttgcaggcgtctgtggctggcgacaaaaagtggctattcggttctacgcaaggcggcgagccggacggcatgggccatcaacgagaaagcgactccggcgagatcgccctcccttgctcggctgcgaccgagtgtgtcgcggcgcaagagggaaaccttatccatgggcgacaggcacacatccgtttccgactctggaatccccgtgacatcgcgctggtcgcgataagcatgccgatgtcgcgaacaggtaagtgacacggtattgcgttgcgcacaattctgcgccagaagggccatgcgtcgtgcagtcgcagccctggaaaagggccttaatcaaaaggccgttgtagccagcgcgcaatcgaggtggagcatgtccagtaatttcctcaatccggtcaatacccagacatggaccaacggccgccatctggtgcgctgcgtgaaggtcatccaggagacctgggacgttcgcaccttctgtttcatgtccgaccagccgatcatgttcttcttcaagccgggtcagttcgtcaccctggagctggagatagacgggcagcaggtgatgcgctcctacaccatcgccagctcaccctcggtgccctacagcttctcgctgaccatcaagcgcatccccggcggcaaggtgtccaactggctgcacgacaacctcagcgagggcgatctgctaccggtacacggcccggtcggcctgttcaacgccatcgacttccccaccgagagagcgctattcctgtccggcggcgtcggcatcacgccggtcatgtcgatggcccgctggttcttcgacaccaatgccaacgtcgacatggtattcgtccacagcgcccgctcgcccaaggacatcatcttccaccgcgagctggagcacatggcctcgcgggtcaacaacttcagcctgcacatcatttgcgagaagcacggcatgggcgaggcctgggccggttatcgcggctacctcgaccagcgcatgctggagctgatcgcaccggatttcgctgaacgggaaatcttctgctgcggaccgaccccgtacatgaacgcagtcaagcgactgctgcaggccaacggcttcgacatgcagcgctaccacgaggaatccttcggcgcgacgccggcagacgtgcgcgaagacgtcaaggaactggccgagcaggctgccgaggcgcccgacgtaccgctcgccgatctcaaacaggtcgagttcaccgcgaccggcaaaagcatccgggtcggccctaacgaaaccgtccattcggccgccgcgcagctcggcctgcacatccccaaggcgtgcggtatgggcatctgtggcacctgcaaggtcatgaagaccgccggcgaggtgaccatggagcacaacggcggaatcaccgacgaagatgtcgcagaaggttacatcctgtcttgctgcagcgtgcccaagggcgacgtcgtcatcgactactgagccccctcctcccgctcccttgaccgcagacctggccgcccggccgggtctgcggcgcaaatccccccgcagccaaccgatccactctccagacgcaccgaccaggccggacgcaacagcgtcaaagccccgccacgcctgtgatccgcgctgaagcgcacttttcgtacgcccccttttcagcggcaccccgacggcatccgacgcgtcgtctccggctgttatcggggtcgacatccggcctgtacgtgaccaaccagtcgagggcgacagccgaggcgctgcgaagatttccgagaacgactgagcatgtcgcaaacgaactctcacaaggcgcaggcaggcatcttcccaccagggcccagccctaccatcgcatccagacagaccaaggccttcaccgaggcgaatggcgccgttgcgcccttaggagatccgcgatgttcagcaagcaagacaaaatccaaggctatgacgacgaactcctggcggcgatggatgccgaggaaacgcgtcaggaacatcacatcgagctgatcgcctcggagaactacaccagcaagcgcgtgatgcaggcccagggcagcgggctgaccaacaagtacgccgaaggctatccgggcaagcgctactacggtggctgcgagcacgtcgacaaggtcgaacaattggccatcgatcgcgccaagcagctgttcggtgccgactacgccaacgtccagccgcattccggctcctcggccaacagcgcggtctacctggcgctgctcaacgctggcgacaccatcctcggcatgagcctggcccacggcggccacctgactcacggcgccaaggtcagcagttccggcaagctgtacaacgcggtccaatacgggatcgacaccgacaccggcctgatcgattacgacgaggtcgagcgcctggccgtcgagtgcaagccgaagatgatcgtcgccggcttctcggcctactcgaagaccctggatttcccacgcttccgcgccatcgccgacaaggtcggggcgctgctgttcgtcgacatggcccacgtggcgggcctggttgccgccggcctgtacccgaacccgatcccgttcgccgatgtggtcaccaccaccacgcacaagaccctgcgcggtccgcgtggcggcctgatcctggccaagagcaaccccgagatcgagaagaagctcaacgccgcggtcttcccgggcgctcagggcggcccgctgatgcacgtcatcgcggccaaggcggtgtgcttcaaggaagccctggagcctggcttcaaggaataccagcagcaggtgatcgacaacgcccaggccatggccaaggtgttcatcgagcgcggcttcgacgtggtctccggcggcaccgataaccacctgttcctggtcagcctgatcaagcagggcatcaccggcaaggatgcggacgccgccctgggtcgcgccggcatcacggtcaacaagaacgccgtccccaacgacccgcagtcgccgttcgtcacctccgggctgcgcatcggtacaccggccatcacgacgcgcggtttcaaggtggaccagagcgtcgagctggcgggttggatctgcgacatcctcgatcacctcggcgatgacgatgtcgaggcgcaggttgcccgacaggtcgctgggctgtgcgccgactatccggtgtaccgctgattcgtaggctacaaggcgcagctgcgattcaccgccagtcggtggatcgctgagcgacgccccgctacgagtcgcatcaccgctttgaggcggtcgtttttcaggagcattcgacatgcaacgttattccggcttcggcctgctcaagcattcattcagccaccacgaaaactggcagcgcatgtggcgcaaccccaagcccaagccggtttacgacgtggtcatcgtcggcggtggtggccacggcctggccacggcctattacctggcgaaagaattcggcgtgaagaacgtcgcggtgatcgagaaaggctggttgggcggcggcaataccgcgcgcaacaccaccatcgtgcgttccaactacctgtgggacgagtcggcgcgcctctacgaacacgcgatgaagttgtgggaaggcctgtcgcaggacatcaactacaacgtgatgttttcccagcgcggcgtgttcaacctcggccacaccctgcaggacatgcgcgacatcgagcgccgggtcagcgccaaccgcctcaacggtatcgacggtgaggtggtcgacgccaagcaggtggcggaaatgatcccttacctggattgctcgaagaacacccgctacccgattctcggcgcctcgctgcagcgtcgcggcggcgtcgcccgtcacgatgcggtggcctggggctatgcgcgtgccgccgactccctcggcgtggacctgatccagcagaccgaagtgatcggcttccgcaaggaaaatggcgtgtgcatcggcgtggagaccaccaagggcttcatcggcggcaagcgtgtcggggtggtcaccgccggtaactccggacacatggccaagctcgccggcttccgtctgccgctcgaatcccatccgctgcaggcgctggtatccgagccgatcaagccgatcatcgacaccgtgatcatgtccaacgccgtgcatggctacatcagccagtcggacaagggcgacctggtcatcggcgccggcatcgacagctacgtcggttacggtcagcgcggctcctaccccaccatcgaacacaccctgcaggcgatcgtcgagatgttcccgatcctttcgcgggtgcgcatgaatcgccaatggggcggcatcgtcgataccaccccggacgcctgcccgatcatcgccaagaccccggtgaagaacctgttcttcaactgcggttggggcaccggcggcttcaaagccacaccgggttcgggccacgtgttcgcggccagcctggccaagggtgaaatgcacccgctggccaaggcgttctcgatcgaacgtttccacaacggcgccttgatcgacgaacacggcgcggctggggtcgcacactgatttagtgccccctccgccgacggcggaggggggaaggttttctggaggtaccgaccatgctgcatatcttctgccctcactgtggcgaactgcgctccgaagaagagttccacgcgggcggccaggcgcacatcccccgcccgctggacccgaacgcctgcaccgacgaggaatggggcgagtacctgtttttccgggacaacccgcgcggcatccaccacgagctgtggatccacgcggcaggttgccgccagtacttcaacgtcacccgtcacacggtgagctacgaaattctcgagacctacaagatcggcgagcgccccagcgtgactgaggcgtctctcgctgcgaagaaggccgtcgaccaaggagtcaaggcatgagccaggtcaatcgtctttcccagggcggccgcatagaccgcaaccgccccctgaccttcaccttcaacggcgaaacctaccagggctacgccggtgacacgctggccgctgcactgctggccaacggcgtcgatgtggtcggccgcagcttcaagtactcgcgtcctcgcggcatcgtcgccgccggctccgaggagcccaatgccgtactgcagatcggcggtaccgaagcgacgcagatccccaacgtgcgtgccactcaacaagcgctgtacgccggcctgaccgccaacagcgtgaacggctggccgagtgtcaacaccgacctgatggggattctcggcaaggtcggcggcgggatgatgccgcccggtttctactacaagaccttcatgtacccgcagaacctctggctgacctacgagaagtacattcgtaaggccgcaggtctgggccgcgcgccgaccgaaaatgacccggacagctacgaccacgtgaaccagcactgcgacgtgctggtggtcggtgccggccctgcgggtctggctgccgccctggccgctggccgcagtggcgcccgggtgatcctggccgatgaacaggaagagttcggcggcagcctgctcagcacacgcgagaagctcgatggcaagcccgccgccgactgggccgccagcgccatcgccgagctggcgaagatgcctgacgtgacgctgctgccgcgggcgaccgtgaacggctatcacgaccacaacttcctcaccatccaccagcgcctggccgaccatctcggtgaagtcgcgcccatgggtgcgctggggcaacgaatcgtgcggcaacgcatgtaccgcgtgcgggccaagcgcgtggtgctggcgaccggcgcccacgagcgtccgctggtttattcgaacaacgacgtgcccggcaacatgcttgccgacgccgtatccacctacgtgcgccgctacggcgtggttcctggccgtcagctggtgctgtcgaccaacaacgactacgcctaccgggccgtgctcgactggcttgacgccggccatcaggtggtcgcggtggctgatgcacgtagcaacccgcgtggtgcctgggtcgaagaagcgcgcaagcgcggcgtacgcgtactcaccggcagcgcggtggtcgaagcgcgcggcagcaagcgcgtcaccggcgcacgcatctgctccatcgacatcgccaaccataaagtcaccagttctggcgaggtggtcgattgcgacctgatcgccagctccggcggctacagcccggtggtccacctggcctcgcacctcggcggccgtccgatctggcgcgaagacatcctcgccttcgtccccggcgagggcttccaacagcgcagctgcgctggcgcggtgaatggcgtgttcgccctcggcgacgcccttgccgacggtttcgaggctggcgccaaggcggccgtcgagactggtttcaaggtcgtcaccggcagcgtgccgaaggtcgaacagcgcgccgaggaagccagcgtcgcgctgttccatgttccccatgacaagcccaccgagcgtgcgcccaagcagttcgtcgacctgcagaacgacgtcaccgcggccggtatcaagctcgccacccgtgaaggcttcgagtcggtcgagcacgtcaagcgctacacggcgctgggcttcggcaccgaccagggcaagctgggcaacatcaacggcctggcgattgccgcgcactcgatgggcatcagcattgccgaaatgggcaccacgatgttccgcccgaactacacgcccgtcaccttcggtgctatcgccggccgtcactgcggcgagctgttcgagcccaagcgctacacggccatgcaggcctggcacatcaagaacggcgccgagttcgaggacgtcggccagtggaagcgcccctggtacttcccgaagaagggcgaggatctgcatgcagccgtggcccgcgagtgcctggccgtgcgtaacgcggtgggcatcctcgacgcgtcgaccctcggcaagatcgacatccagggcccggacgcgcgcgagtttctcaaccgcgtctacaccaacgcctggaccaagctggacgtgggcaaggcccgctacggcctgatgtgcaaggaagacggcatggtcttcgacgacggcgtgaccgcttgtctggccgacaaccacttcctgatgaccaccaccaccggcggtgccgcacgggtgatggaatggctggagatctaccaccagaccgaatggccggagctgaaggtgtacttcacctcggtcaccgaccactgggcgaccatgacgctgtccggtcccaacagccgcaagctgctggccgaagtcaccgacatcgacctggacaaggacgctttccccttcatgacctggaaggaaggcaaggtcggcggcgtaccagcacgggtgttccgcatctccttcaccggcgagctctcctacgaagtcaacgttcaggccgactacgccctgggtgtgtgggagcagatcatcgaggcgggcaagaagcacggcctgacgccctacggcaccgagaccatgcacgtactgcgtgccgagaagggcttcatcatcgttggccaggacaccgatggatcggtgaccccggacgacctgaacatgggctggtgcgtcggccgtaccaagccgttctcctggatcggctggcgtggcatgaaccgcgaggattgcctcaaggaaaaccgcaagcaactggtcggcctcaagccgctggacccgaaaaaggtgctgcccgaaggcgcgcagctggtcttcgatcccaagcagcccatcccgatgaccatggtcggccacgtcacctccagctacatgagcgcggcgatgggttattccttcgccatggccctggtcaagggaggcctcaagcgcatcggtgagcgggtctacgcgccgctggtcgatggcagcgtgatcgaggccgagatcgtcagctcggtgttttacgacccgaaaggcgaacggcagaacgtgtgaccgatgtgtatggctggactccgccccctcaccctaaccctctccccagtggggagaggggatggcaacggtgttgcggtcatgcacgaacaactccctcgcccctttggggagagggcaggggtgagggggcgatgcttcggcgagcgcataaaacgccacaccaagaattccaacggcgccccacagcgcccaggcaggtgaaccatgaccgcagtcaacgtctacaaacaacgccccgacacgattgaagggcaatccccgctgcaccatgccggcctcgccgagctggtgggcaagggcaaatccggcgccggcatcaccctgcgtgaaaagaagctgcgcgggcacctgaccctgcgtggcgacgcccacgacccggccttcgccaaaggcgtacaggatgtcctcggcatggatttgccggtggcgctaacgctggtggcgaacggcgagacctccttgcaatggatgggtccggatgaatggctgctgatcgtgccggagggcgaggaattcgccaccgaacagcggttgcgcgaggccctggccgggcagcacatccagatcgtcaacgtcagcggcggccagaccctggtcgagctctccggcgagaaggttcgcgagctgctgatgaaatcgacgccctacgacgtgcacccgagcaacttcccggtgggcaaggcggtgggcacacacttcgccaagagccagctgatcatccgtcacaccgccgaagatgtctgggagctggtggtacggcgcagcttcgccgactacatctggctctggctgcaggatgccagcgccgagtatgggctggcgatcgaggcgtgaaacccaggtggacggcgcctcgcacgtccgcctcaaaccagtgacgcaaggatgccgcgcgagcgacgcgccccaccctacgcccgcccagcttgggagatgaacatgagccgcacgcccgatacctggattctcaccgcgaacagcccgagcctgctcggcacggtcgacgtggtgacccgttatctgttcgaacagggctgctacgtcaccgagcaccacagcttcgatgatcgcctggtcaatcgcttcttcatccgggtcgaattccgcgcgccggacggcttcgatgaaacggcattccgtgccggtctgatcgagcgcgtcacgcccttcgacatgcacaccgagctgacgcctccgggctaccgggccaaggtggtgatcatggtgtccaagtccgatcactgcctgaacgatctgctgtaccgccagcgtatcggccagttgccgatggacatcgccgcggtggtgtccaaccacccggatctggaaccgctggcgcgctggcacggcatcccctatcaccatttcccgctcgatccgcgcgacaagccggcccaggagcgccaggtgttgcaggtgatcgaggacagcggcgcggaactggtggtgctcgcacgctacatgcaagtgctctcgcccgagctctgccgcacgctcgacggccgcgccatcaatatccaccactcgttgctgcccggcttcaagggcgccaagccctaccaccaggcgtaccagaaaggcgtcaagctggtcggcgccaccgcgcacttcatcaataacgacctcgacgaagggccgatcatcgcccagggcgtcgaaccagtggaccacacccattatcccgaagacctgatcgccaagggccgcgacatcgaatgtctgaccctggccaaggcggtcggctatttcctcgaacgccgggtattcctgcacgccaaccgcacggtggtgctctaggtcccggccacagattcacagctccactacaagaccgcgcgacctcccgtcgcgccttgtattcacaaaaacaaaggagaaaggcagatggctgacaatcgtggcgtcgtttacctcggcgcaggtaaggtcgaagtccagaaaatcgactatccgaagatgcaggacccacgcggacgcaagatcgagcacggtgtgatcctgcgcgtcgtttccaccaatatctgcggctcggaccaacacatggtgcgcggccgcaccaccgcccaggtcggcctggtgctcggtcacgaaatcaccggggaagtcatcgagaaaggcagcgatgtcgagaacctgcagatcggcgatctggtttcggtcccgttcaacgtcgcctgcggccgttgccgctcctgtaaggaacagcacaccggcgtctgcctgaccgtcaacccggcgcgtgccggcggcgcttacggctacgtcgacatgggcgactggaccggcggccaggccgaatacgtgctggtgccctacgccgacttcaacctgctcaagctgcccaaccgcgacaaggcaatggagaagatccgcgacctgacctgcctgtcggacatcctgcccaccggctaccacggcgcggtcaccgccggtgtcggcccgggcagctcggtgtacatcgccggtgctggcccggtcggtctggcggctgccgcctcggcgcgcctgttgggcgccgcggtggtgatcgtaggtgacctcaatcccgcccgcctggcccacgccaaggcccagggtttcgagatcgccgacctgtcgctggacaccccgctgcacgagcagatcgccgccctgctgggcgagcctgaagtcgattgcgcggttgactgcgtgggcttcgaggcccgcggccatggccatgaaggcgccaagcacgaggcccctgccaccgtactcaactcgctgatgggcatcacccgcgtcgccggcaagatcggtatccccggcctgtacgtcacagaagatccgggcgcggtggatgccgcggcgaagatgggtgccctgagcattcgcttcggcctcggctgggccaagtcgcacagcttccataccggtcagacgccggtgatgaagtacaaccgcgcgctgatgcaggcgatcatgtgggaccgcatcaacatcgccgaagtggtcggtgtgcaggtgatcagcctggaccaggcgccccagggctatggcgagttcgatgccggcgtgccgaagaaattcgtcatcgacccgcacaagatgttcagcgccgcctgatccgtcgtcagcagttgattcgtcctgcggattggcgcctgcaggactctgatatcaagcactttggggagccttctggctcccccttttttttgcagagcagattgccggcgtttcagtacggccgaggcatagctgccccagcgtgacctgcacgcgtgatgcgaatgccagtcagcctggcagcccgatggcccgtccgacgtggatcggcctgggcaagtcctgctgcgcctcgtacaagtcccgtaccgcgatgagcacggccggatcgaacggcgccgagcggcctgctcggcgatcgatgttgatcagcatttgctcgtttgctgccagcagacgctcctcccctgtccgataaagcccgtggtagacctgcaaccgcttgcgatcgtgggccagcagctgcgtgtgcacctccacctcggcaccgagcttgacctcggccaggtaattcagatggcactcgagggtgtacagcgtgtgtccgctgcgctcgcgcccggcctggtcgaggccgatccgggtcatcagcgcatccgttgcgtagctgaagatcagcaggtagaaggcgtctcgcaggtggtcgttgtagtcgacccactcgggcaggatcggggtgcgataagtcgtgagcattctgatggtcgtccttcgtcgtgtccggttctcggtgccgtcgcgggccggaaatggccggccgcaagcggcatggccgctcgccgggtagcgcggtcgcagccggcgctaccgactatggccgcccgaagcgcctggttatcccgtcttgacgttttgagcaataccccagtcgtttttgcatcgggacgacatcccccccggggataagctgccgcaaagcgtcgataaaacgtttcgatgcgccgcactggggagttacctgatgaacccaaccgaactgcacgctgacagcatcgtcattgacggtctgatcatcgccaaatggaaccgtgaactgttcgaggacatgcgcaagggtggtttgacggccgccaactgcaccgtctcggtatgggaagggttccaggccaccgtcaacaacatcgccgccagccagaagctgatccgcgaaaacagcgacctggtgatgccggtgcgcaccaccgccgacatccgcaaggccaaggaactgggcaagacgggcattctgttcggcttccagaacgcccatgccttcgaggaccagatcggctacgtcgaggtgttcaagcagctcggcgtgggcattgtgcagatgtgctacaacacccagaatctggtcggcaccggctgctacgagcgcgacggcggcctgtccggcttcggtcgcgagatcgtcgccgagatgaaccgcgtcggcgtcatgtgtgacctgtcccacgtcggctccaagaccagcgaggaagtcatcctcgaatcgaagaagccggtctgctactcgcactgcctaccgtccggcctgaaagagcatccgcgcaacaagtccgacgaggaactgaagttcatcgccgaccacggcggcttcgtcggcgtgaccatgttcgcgcccttcctggccaagggcatcgactcgaccatcgacgactacgccgaggccatcgagtacgtgatgaacctagtcggcgaagacgccatcggcatcggcaccgacttcacccagggccatggccaggacttcttcgagtacctgacccatgacaagggctacgcccgccgcctgaccaacttcggcaagatcgtcaacccgctgggcatccgcaccgtgggcgagttccccaacctcaccgagaccctactcaagcgcggcatgcccgagcgcaccgtgcgcaaggtgatgggcgagaactgggtgcgggtactcaaggacgtctggggcgagtgatgaatacctccggagccgactgcgctacggctccacaggcactcatccgcactattccaacacgcaagacaacgaattctggagtttgaacacatgtccacccacgcccccgaaatgcccatccaggtcgacgacgaaaccggcgtctggaccaccgacgccttgccgatgctgtatgtgccgcggcatttcttcgtcaacaaccacatcggcatcgaggaagtgctcggcgccgagaagtacgccgagatcctctacaaggccggctacaaatccgcctggcactggtgcgagaaggaagccgagtgccacggcctggttggcgtggaagtcttcgagcattacatgaagcgcttgtcgcagcgcggctggggcctgttcaagatccagtcgatcgacctggacgccggcacctgtgaggtacgcctggaccactcggccttcgtgtacgtctacggcaaatgcgggcgcccggtcgattacatgttcaccggctggttcgccggtgccatggatcagattctccaggcgcagggcagcgagatccgcaccgtcgccgaacaggtgtatggcgcctcgcaagaaggccacgaccacggtctgttccgcgtcaaaccactctaaaaaaaggtatgtgagacgggcttagcggcgacatggccgcccagccctccacaaagaaaacgctaggctgcttttccgtgagggtgccgcaatggctttcgaagcaatgttccagccgatccagatcggcaaactgaccatccgcaaccgcgtgatcagcaccgcccacgccgaggtctacgccaccgacggcggtatgaccaccgagcgttacgtcaagtattacgaagagaaagccaagggcggcatcggcctggcgatctgcggcggctcctcggtggtagccatcgacagcccgcaggaatggtggtcgtcggtgaacctgtccaccgaccggatcattccgcacttccagaacctggctgacgccatgcacaagcatggcgccaagatcatgatccagattacccacatgggccgtcgctcgcgctgggacggcttcaactggccgaccctgatgtcgccatcgggcatccgcgaacccgtacaccgcgccacttgcaagaccatcgagccggaagagatctggcgcatcatcggcaactacgcccaggccgcacgccgcgccaaggaaggcggcctggacggcgtcgagctgtccgccgtgcaccagcacctgatcgaccagttctggtcgccgcgtgtgaacaagcgtaccgacgaatggggcggcaccttcgaggggcgcatgaagttcggcctggaagtgctcaaagccgtgcgcgccgaggtgggtgacgacttctgcgtcggcatgcgcatcaccggcgacgagttccacccggacggcctcacccacgaggacatgaaggagatcgccaagtactacgacgccaccggcatggtcgacttcttcggcgtgatcggctcgggttgcgacacccacaacaccctggccaacgttattccgaacatgagctatccgccggagccgttcctgcacctggccgccggcatcaaggaagtggtcaatgtcccggtcctgcatgcgcagaacatcaaggacccgaaccaggcccagcgtatcctcgagggaggctatgtggacatggtcggcatgacccgcgcccacatcgccgacccgcacctgatcgccaagatcaagatgggccaggtggaccagatcaaacagtgcgtcggcgccaactactgcatcgaccgccagtatcagggcctggacgtgctctgcatccagaacgcggccaccagccgcgaatacatgggcttgccgcacatcatcgagaagtccaccggaccgaagcgcaaggtggtagtcgtcggcggtggcccggccggcatggaggcggcgcgcgtcgctgccgagcgcggccatgacgtgactctgttcgagaagaaggacagcctcggcgggcagatcaacctcgccgccaaggcaccgcaacgtgaccagatggcaggcatcacccgctggttccagctggagctcgcccgcctcggcgtcgaccttcgcctgggcaccggcgccgaccccgaaaccatcctcgacctgcgtccggacatcgtggtgctggccaacggcggccatccgttcatcgagcagaacgagcactggggcgcggaagaaggcctggtggtcagcagctgggacatcctcgatggcaaggtggcgcccggcaacaacgtgctggtctacgacaccatctgcgagttcaccggcatgtcggtcgctgacttcatggccgagaaaggcgccaaggtggagatcgtcaccgatgacatcaagcctggcgtggccattggcggcaccagcttccccacctactaccgcagcctgtacccgaaggaagtgatcatgaccggcgacctgatgctggaaaaggtctatcgcgagggcgacaaggtggtggcggtcctggagaacgaatacaccggcgcgaaggaagagcgggtggtcgaccaggtggtggtggaaaacggcgtgcgtcctgacgagaccctgtactacgcactcaaggaaggctcgcgcaacaagggccagatcgacgtcgaggcgctgttcgccatccaaccgcagccttgtctttcgcagagcggcgacggctatctgctgttccgtatcggcgactgcgtggctcagcgcaatacccacgcggcgatctacgacgcgctgcggctgtgcaaagacttctgaccccgcgacaggccgcaggcgtcaggcgacaggctagaagccagggttgcgcccttgctttttcctgcagcctgcagcctgaggcctgcagccccaatccggtaagctgcgatgcttgacgttatccttcccatcctgctgttcgccgccctcgggcttgccgtactcggcgcaggcaggcgcttcgccatgtggcgccgcggtcgcccttcgaaggtcaactggctcggcggcctgatggccatgccacgacgctacctggtcgatctgcaccacgtggtcgagcgcgacaagtacatgtccaagacccacgtcgccacggcgggcggcttcgtcctggcggctttgctggcgatcgtcgtgcatggcttcggcctgcagaaccggattctcggcttcgccctgctggccgcctgtgtgctgatgttcgtgggtgcgctgttcgtcgccaagcgccgtcgcaacccgccggcacggctgtcgaaaggcccctggatgcgcctgccgaaaagcctgctgatgttctcgttcagcttcttcatcgccaccctgccggtcgccggcatcctgccggccgattttggcggctggatcctcgcggccgtgctggcgctgggcgtggcctggggcgtgtcggagatgttcttcgggatgacctggggcgggccgatgaagcatgccttcgccggtgccctgcacctggcctggcaccgtcgccctgagcgtttccgcaccccacacaatgccagcgcggcccgctccagcggcctcaaggcactggatctgaccgacccgaacgcaccgctgggcgtggaaaaacccaaggacttcacctggaaccagctgctcggcttcgatgcctgcgtgcagtgcggtcgctgcgaggcggcctgcccggccttcgccgccggccagccgctgaacccgaagaagctgatccaggacatggtcgtcggcctcgctggtggcagtgacaaaggctatttcggcagcccctacccaggcattccggtcggtgagcacggcggcaacccgcaccagcccatcgtcttcgccgagggcaagggcctggtcgaggcggaaacgctgtggtcctgcaccacctgccgcgcttgcgtcgaggagtgcccgatgatgatcgagcacgtcgatgccatcgtcgacatgcgccgccacctcaccttggaaaagggcgccacgccgaacaagggcgccgaggtgctggacaacctgatcgccaccgacaacccgggcggtttcgctcccggtggtcgcctcaactgggccgccgacctgaacctgccactgatgagcgagaagaaacaggccgatgtgttgttctgggtgggcgacggtgccttcgacatgcgcaaccagcgcaccctgcgcgccttcgtcaaggtactcaaggccgccgacgtcgactttgccgtgctcggcctggaggagcgtgacagcggtgacgtggcacgccgcctgggtgacgaggcgaccttccagacgctggccaagcgcaacatcgaaaccctggccaagtaccgcttcaacaagatcgtcagttgcgatccgcacagcttccacgtgctgaagaacgagtacggcgcactgggcggcgagtacctggtactgcaccacagtacctacatggaagagctgatcagcggacagaaactcaacctcggccagcaccccttatctcaacagcatggcggcagcgtgacctatcacgatccctgctacctgggccgctacaacggcgagtacgaagccccgcgcagcgtgctcaaggccatcggcatcgaggtcaaggaaatggagcgctccggcttccgttcacgctgctgcggcggtggtggcggtgcgccgatcaccgatatccccggcaagcagcggattcccgacatgcgcatggccgacatcaaggagaccggcgccgagctggtggccgtgggctgcccacagtgcacggcgatgctcgaaggcgtggtcgaaccgcggccgcagatcaaggacatcgccgagctggtagcggacgtattgctggagacacccgccccggcgaaaaagcccgcgacggccaagcctgaagccctggaggtgcactgatgagcgacatcatccgccgcgacccacgcaccgagtggatcgcccgcaaccgcctgcatccgttgcacgcagccatgcagaaggccgaaaccagctggatgggacccaacggcatcatccgcaagaacccgcatgcggtcggcttcatcggccccaacggactcaagcgcatcgaccgcagcggtgcccagcaaggcggcagcgccaaacgcagcgccgccagcgcggtggttcagctgccgttgcatgtggtcgaacaaccggctttctacatcgccgtggtaccggacatggtcggcggccgtctgagcagtcacgacaaggacctgctcggcctggccaacaagctggccggggaagcgggcgcagtggtcgccgtggtgttcggcgactacaaggagaccgccttcgacaccgccggtgtcgatcgcctggtgcacatcgagggcgaagccttcgaaggctatgcgccggaagcgcgggtactggccctcagcgcggtggaaagccagttggcgccacgccactggttgctgccggacagccgcaccggcggtggcgagctcggccggcgcctcggcgccaagcttggtgagcgccccgccacccgcatctggcaggtcgccgacggccaatgcatcggccgcgccggtgccggccagcaggatctggtacgcaaggcgccgcgcctgattctggccgccgtcgagtgtgccgatccggtcagcgacacccgccatgaagtgcgccacctgccgctcgagaacgcgatcacccgttgcctgccacgcatcgaagacctcggcgcggtggcggtcgatccggcccttatccccatggccgaagccgagttcattctctccggcggcaacggggtcaacgactgggccttgttccaccaggccgccgaagcgctcggcgcgaccgaaggcgcctcgcgggtcgcagtggacgacggcttcatgccgcgcgaccgccaggtcggtgccaccggtacctgggtcaccgcacgggtctatctggccgtcgggatttccggcgccatccagcacctgcagggtatcggtgcctgcgacaaggtcgtggccgtgaacatggaccccggctgcgacatgatcaagcgcgccgacctggcggtgatcggcaattccagcgagatcctcgccgcactgatcgagctggccaccgaatatcgccagggagacgctcgcgatgcggcgtgaacagcgagctcacgaaaaacccgtagggtggatgacgcgtcacccatccaccgggaaagactgcacattgatggtggaagaaagaagcgtcttccaccctacggagtcgcgtcatgactgacctgaacatcatcgccctggtctcggtaggcgcccatccgacctcgggccgttcccgccgcgccgagcaggatgcccgcgccgtcgagctcggcctgcggctcgccggcgaacgcttgcagctgctgcatgctggcgacccgcaggagccggcactgcgtggttacctgggcatgggcctgagcgaaatgaccgtgctggagcagcccggccactgcgatgcgctgccactgctgaacaactacctgcaggatgctggcgcccatctggtgctgaccggcagccaggcggaaaccggagaaggctcaggactgctgccctacctgctggccgaacgcctgggctggcccctggtggtcggcctggccgaggtggagaaggtcgagaacggcgtggctcaggtgctgcaagccctgccccgcggccagcggcgccggttgaaggtacgcctgccgttcgtcgccagtgtcgacaatgcggcgccggcggcgcgtcagagcgctttcggtccggcccgccgaggcgagctgcgcgccgaggatgtcgccgtgatcgaggacagcctgctcgaggaggcgcagctgcaaccggcgcgaccacgtcccaagcgactcaaagtgatcaaggccaagaccggcgccgaacggatgaaagccgcaaccgccaaggcctccggcggcggtggacaagtacttcaagacgtatcgccgcaagccggtgccgaggctatcttcaaattactgcgcgacgagggcgtgctgcgctgagcgtagcgccgcctcgcctaccgaagccaaagggagctaacacgatgatgcacgccgatctgatcgaccaggacgatttccgtgatcgtctcgtcgcactgggctttgaaattcccagtggcgccaccgctgaacaagcttgcgaacgcgccgtcgttggcctgtcccgggagcgcgcgcaggcgctacgccgcctggtcgaagagctgctaggcggttccgcgacgctgctacctgcggtgcgtgaagccatcagccggaatctgcttccggcattggtacgcgccaactaacctcacggggcacctgtgacgccacatgacggcgtcataggtgcatggctagagtcgaagcggagcgcagccgctgcaaaaaagggccgcaaaaaagctgcaagaaaaaaggcggatgacaccgtcatccgccttcttcggacaggctgtgagcgacgtcagacgcgaacgctggcgaaggtcgactcaccctgggcacgctgcaacgcagcgatggttgcagggttcctgttgccgtcatcggggcgcggtatcagcgcaaccacctgcgccgactgctggcccgagcgctcgtcacgcggcggaatgccgaagaactcgcggtagcacttggaaaagtgcggagtcgagacgaagccgcagaccgaagccacttcgatgatcgacatcggcgtctgcttgagcaactgacgggcacgtatcagccgcagcttgaggtaatagcgcgacggcgagcagtgcaggtatttctggaacagtcgctcgagctggcgccgggacacattgacgtagcaggccagttcgtccaggtcgatcagctcttcgaggttggcctccatcagagccacgatttccagcagcttcggctggttggtgcccagcatatgcttgagtggcacgcgctggagatcctgttcgctgcgaatgcgctcatacatgaacatgtcggagatggccgcggccagttcacgcccgtgccgggcgccgatcagttgcagcatcaggtccatgggcgcggtaccgcccgaggcggtgtggcgattgcgatcgatggagaacagccgaggggtgaccgaggtacgcgggaaggcttcctgcatcgccgccaggcattcccagtgcacgctgcagtcatagccgtcgagcaaaccggccttggccagggcccagctgccggtgcataccgcaccgagctggcgcccgtggcgagcttgcacctgcaaccagtgcagatgctcgcgggtcacgctgtgctgaatgtccacgccgccgcaaacgatgacgctatccaggctgggtgcggtctcgaagctggcgtccggggtgatctgcaagccatcgctggcggtcactggctgccccgcctgggtcacggtgaaccagcggtacagctctttgcccgatagctgattggccatccgcaaaggctccacggccgaggccagggagatcagggtgaagttatccagcagcaggaagccgatggtctgtgggagccgatttgggggctgcgacccgggattgatctgtgacaatgacggaccctcacgctaggcatttctcgtgagccttcgacgaggctcttatttttgtgtttccgacgctctacggcgccagctcatgcatatatcaaggcaaacaacatgcctattttgaatgctcgttcaataaaaccacccgacagcctggaacgcccgccgcgcaaggcttgcaacaagcggaacgggcgctgaagactcctgggcgttacccctcggtgggcagtttcgtagcagtggccgaagggctgaccggcataaaccacgcactgtcatgcggtggtaacagcagcgggtaacaagcccgggttacaagcgcgggacaggaccgctcgcgctcggcgaaacgcaccacggctggtcggcgtaacggtgctgatgcaccgcttcggctcagcactcgatggcattgaccgccaggccgccacgggacgtttctttgtacttgtcgtgcatgtcggcaccggtgtcacgcatcgtgcggatgacccggtcgagcgagatgaaatgctcgccgtcaccacgcatcgccatctgggccgcattgatcgccttcatggcggcaatggcattacgttcgatgcaaggcacctgcaccaggccgccgaccgggtcacaggtcaggcccaggttatgctccaggccaatttccgcggcattctccaactgctcgggcgtcgcaccgagcaactcggccaagccggctgcggccatggcgcaagcggagcccacctcgccctggcagcccacttcggcgcccgaaatcgatgcgttcttcttgcacaggatgccgatcgacgcggcggcgagcaggtagtcgaccacgtcgtcgtcggacgcttccggatggaatttcatgtagtagtgcaggacagccgggatgatgcccgccgcgccgttggtgggcgccgtgaccatgcgcccacccgccgcgttttcctcgttgaccgccagggcgaacaggttcacccactccatcgcgctcatggtcgagccgatgacattcggcttgcccagctccatcaggttctgatgcagcttggcggcccgccggcgcaccttcagcccgccgggcaatatgccctcgtggcgcagaccattggcgacacactgcttcatcgcctcccacagacgcaacagcccctggcggacctccgcctcgctgcgccaggccagctcgttggccatcatcaattgactgacgcgcagcccgtggcgcttgcacagttgcagcaactcgacggcgctggaaaagtcgtacggcagcaccgtgtggtcctggtccagctgaccggcggcggcctgctcggcattgaccacgaagccacccccaacggagtagtaggtgtcctggtgcaatacttccgagtgtccgtgcgcgatgaaggtcacggcgttggggtgatacggcaggttctcctcgagcagcagcaggtctctcgtccagtcgaacgccaccggccagtggccggcgagccgcagctgcccgcaggaccgaagcgctgcgatgcgtggtccgatctgctcgggatcgatcaggtccgggcgctcccccatcagacccatgatcacggcgttgtcggtgccatgcccgacgccggtggccgacagcgagccatacaggcgcacctcgacacgccatacccgctcgagcagcttgcgctcgcgcaaggcatcgacgaatagcgccccggcgagcatggggccaaccgtatgcgagctggacggaccaatgccgattttgaaaaggtcgaatacgctgatcgccacgctgaacactccactggatgccctggaaacaggcgccatcatggtggttttgcggacacatagaagtctggcaccgacgtggtcatgcccaaatccgtcaaatcgcccaataagtgaccaatgagtcctgcgggcgcctgcgccgttcgaacaagtgatagccgccggcatttcgtcatcatcagggccgctcggtgcgcttgcctgcgggcagcgcacggccgctttcagaggttgcctgggcggcggccaaccggtgcctagcatcagcttgtgacaggctcatgaacgaaagcagccgagaggtgctcgcgacaaccggctcgaatcgccgggaaaagccctttcttataacgcctgtcctccggcgctggcgcggccgttccagccgctccggaacaacgctgggaaatggcgaaaatacccctgactagagcgccggccgttgagtaatcgcgcctttctgctgaatttttttcatcttctgcttagtggctacaggccacggcatataggagctccagcaaaatcgcgaccttgtggagcaaagcgctgaaaagcgcagcggtgccatgatgaatttttttctgttatggttttttaagcagtgcatgtcgccgttcagtatgtaagcgtcgtaactcgacaattgctgccgccggagggggatatcgttaatccatattcctcagccgccagccaacagcgttggccactgggtgccttgcgagacatagctgcagtcgtcccaaacggctgtacacataacaagaaatgggtaccggttccgctccacacagagcgacgaccacgatgagcttactagcactgccaaaggatagaagcggttacgacactgcggtgaatacgcaacgatgccgagccagcaaacgtgcgagacgggccactgtcccgcctgcacggtcgcagcccgtcgagccaccgcgagaccgcttccagccaagaacatgccaacccacagccataaccgttggcataagccggcgagcgttgcgagacgcttgcggcctccgtttagctgatctggatgtctactgaggggaaccgtcccatgcagtctggaaaaatcgtcgtcgagaacctgtacaaggtcttcggcccacaagaacaagaagccatcgccttgctcaagcaaggctggagcaaggacaagattctcgccgagcgcggcgcggtcatcggcgtgagtgatgtttcgttcagcgtcgaggaaggcgaaatcttcgtgctgatgggcctgtccggctccggcaaatccacgctgatacgcctgatcaatcgcttgatcgagcccagcgccggaaacgtcttcatcgatgggcagaatgtagcgaaactgccccactcacagctcatcgacctgcgccgtcgcgacatgagcatggtcttccagtcgtttgccctgatgccctcgcgctcggttctggacaacgccgccttcggcctggaagtcgccggcgtcggccgcaaggaacgcgaagagcgcgccatggcggtgctcacgcaggtcggcctcgacaccttcgcgcagaagtttccgcacgagctttccggcggtatgcaacagcgggtcggcctcgcccgggcgctggccgtgaacccctcgatgatcatcatggacgaagccttctccgcgctcgacccgctcaagcgccgcgaaatgcaggacgtgttgctggaactgcagaagacccatcgacgtaccatcatcttcgtctcccatgacatcgaggaggccatgcgcatcggcaatcgcatcggcatcatggaaggcggcaagctggttcaggtcggtacgccgcaggaactgatcgacaaccccgccaacgcctacgtgcgcaacttcttcgaaaccgtcaacaccagccgctacctcaccgccggccagctcaaggccgacagcgttccgctctacgtgcacaacggcaaggcgccggacgccctgcaggtctgccaggaactgcaggcgatggacaagcactacgccttcatcgtcgatgagaacaggaagttccgcggctcgatcagcctggaacggatcgccctgctggtcgagaacggccagacctgcagtctcgatacggaagtgttgaaacagatcgaccctcttaccgaagaccagccactcgatcaggtgatcgaacgcctggtggataacgagggaccgatgcccgtggtggacagccaagggttctacgcgggcgccatcagtaaaggccgccttctgactcgcctgcaggaggattgatcatgagcaaagatctggatctggggagctgggtcaacgacgtcgtccagcatctgctggagaactacagcggcgcattcgacagcctcggcagcgtggtcagcggattttccgagggcgtcgaagcgttgctgatgctgccgccggcctggctgctcatcgccatcttcgtcggcctcggcctgtggcgcatcggcgcccggttcgccgccttcaccgcggtgtccttcattctcatcgtgctcaccggtttctgggaacagaccgtggtgaccctcggcctgaccttctccgccacactgatcagcctgttgctggggattccgctgggcatctggtcggcgcgcagcgagcgggtcgccaccatcacccgcccgattctggacttcatgcagaccatgccggcgttcgtctacctgatcccggccgcgatgctgttcggcctcggccgcgtacccggcatcatcgccacggtgatcttcgccatgccgccggcggtacgcctgaccaacctcggcatccgccaggtcaacaaggaaatcgtcgaagccggccagtccttcggctgcaacggtcggcagctgctgttcaaggtccagttgcccaacgccatgccgtcgatcatggccggggtcaaccagaccatcatgatggcgctgtcgatggtgatcatcgcctcgatggtcggcgccggcggtctgggcaacgacgtgttggccagtatccagcggctggatatcggcctcggcttcgaaagcggcatggccgtggtgctgctggcgatcatcctcgaccgcatcaccgagagtttcggcaccgccaagcgggccacgcagaaagcgacctggtacacctgggtgaccaccaagctcaggccgcagggccagtaagcgcaacgatcccattcggaaaaaggaaatcagaatgaccaatttcaagacgatcacgggtatcggcctgctcgcctgcacgctgttgcaaagcgcctgggcacaagagccggcgagttgcgagaaggtgcgtttcgccgagatcggctgggccgacatcgccgcgaccaccggtgtcgcgatggtcctgaccgagggcctgggctaccacccgagcaaggtgatggcctcggtaccgatcgccttcaccggcgtaaagaacaagcaaatcgacgcctttctcggctactggtcgccctcgatggacgccgtgatcgaacccttcgccaaggacaacggcgtcaaggtgctcgagtcacccaacctcgaaggcgccaagtacaccctggcggtgccgacctatgcggccgaagccgggctgaagagcttccaggacatcgccaagttcaaggatcagctgggcggccgcatctatgcgatcgagccgggcaacgacggcaacctcttgatcgagaaaatgatcaagaacgaccagttcggtctcggtgatttccgcatggtcgaatccagcgaggccggcatgctggtgcaggtgcaacgggcgattcggaagaaggagccggtggttttcctcggctgggcgccgcacccgatgaacacccagtacgacctgacctatctcgccggcggcgatgatgtgttcgggcctgacttcggtgccgccaaggtgttcaccgtagtgccgcctgactacctggagcgctgctcgaacgtcggaaagctgctgcagaacctgcaattcaacgtcgccatggaaagcgagctgatgcagatggcgcaggagcgggacgatccgcaaaccgtcgccaagcaatggctcaaggcgcatccggacgtcctcgatcagtggctggccggagtcaccactcaggacggtcaggacggcgtcgccgccgtcaagaagttcatcggcctctgagcgccggcggacaagacagggccaggcgcgcatagccggcaggcccgcctcggcccacgcaccgagacgagcctgcgctgccgccccaacaccaacatttttccgttcgccggtgcgcaagcagaaccagcgcgccgaaccgtgcacgggacttcgcccaaacgccgaggtccctgcgacaaaccgtggccttcgcagagcgggaccatggttggcatcactgccatttcctgacatggagctaacacgcatgagtctattcaagcaccttctttgtggcctcggcgccgccaccatggcgctcggcatggccagcagcatggcggcggcaagcccgagctgaagatcggctacgtcaacggctgggacgacagcgtcgccgccaagcacgtggcgggcgaaatcctcgaaagcaaactgggctattccgtcaagctgcaaccggtcgaaccggccatcatgtggcagggcgttgcgcgcggcgacctcgatgccaccctctccgcctggctgcccgccacccacggtgagtacttcgagaaactgaaggacaaggtcgtggtgctcggcaccaactatgaaggcgcgaagatcggcttgatcgtgccggattacgtcgaggccaaaagcatcgaggacctcaacaagtacagcaaggcgttcgacggcaagatcaccggcatcgatgccggcgccggcgtcatgcgccggaccgaagatgccatcaagcaatacgatctggacatccgcctgatgcccagctccggaccggcgatgaccactgctctgacgcgcgcggagaaggcccagaagccgatcgtcgtcaccggttggatcccgcactggatgttcgccaagtggaaactgcgcttcctggaagacccgaagaaggtcttcggtgatgacgaacacgtcgacacggtcgctaatccggggctcgccagcaaggcgcccgaagccgaggccttcctgaagaaattcagctggggcgccgaagaagttggcgaggtcatgctggcgatccgcgacggcgccaagccggacgatgctgcacgcgagtgggtgaagaaccacccggaacgcgtcgccggctggctcgaataacccccacccaaccaaaccctcatccacggcggtgcccagtgggcgccgctgatgcaacggagtcaccaacatgcaaacattgagatggagcgccctggcgctggccgtcacggccgcctctgctcaactggccgtggccagcgaacagtcggaagccaccggcttcgccgacggcggcaagctgacactgctgaacaagaactactacttcgcccgcgacaaccatgtctccggagccgatccgagccgcatcgaagagtgggctcacggcatgctgctctcttatgagtccggcttcacccagggcaccgtcggcttcggcgtcgacctgcatgccggtggcgcggtcaagctcgacagcggccgcggcaccagcggcaccggcctgctgccggtcgacagcgacggccgtgctgccgacaacttcggcttcgctggcggcgcggtcaaggtacgtgtctccaataccaccctgaagtatggcgacctgacgcccaccgctccggtcttctccccgggcaccggacgcatcttcgccagcaccgccaccggttttcagctgacctccaacgagatcgaccagctgaccgtcgacgccggctatttcacctcgattcgtgaccgcaaccgctcgctcaaccacgacggcgagatcaccctggtctacgccggcgccatcgattcggagaccgtcagctacctgggcggcacctaccagctcaccgacagcctcagcgccaccctctacggttccaagtacgaggacgtctggacccagtactacggcaacctgaactacgcgctgccactctccgaaggtcaggcgctgtcgttcgacttcaacgtctacgacacccgtgacgaaggctccgccctggctggcgacatcaacaccaccgcctggtcgctggcggctggttattcgatcggcgcgcataccttcaccctcgcccaccagcaggtgaacggcaactcgcccatggactacatcagcatggacggcaccaacgccggtgattcaatctacctggccaactcctcgcagtggtcggacttcaacgcgccgggcgagaagtccgtgcaggcccgctacgatctcaacatgacggcctacggcgtgccgggcctgaacctgatggcccgttacatcaagggtgatatcgacggcgccagcgtcgacaccggcggcgcctacgcctactacgcgggagatgccggcaagggcaaggagtgggaacgcgacctcgaagccaagtacgtggtgcaggaaggcgacctcaaagacctttccctgcgggtgcgttacgccaccgcgcgcggcttcgccggcgacatcgacgagctgcgcgtgatcaccgagtaccccctggacattctctaagcagcatctgcgtacgggcgctgaatgcgcccgtacacacattgtcagaacgccgccgcggccgtgcccggcggctttcggtgagtggcggcgtactgcatcgcgaaggcctgctcacggccggtgttcggtttcggacttctgcccttgcggtccgcgacagatcttatccattcccgacaacgtcgcttttattgattgatcgttcaatcaataaaaattagggtgtaccgcattcactgtcttccggagcctccaatgcccaaggttggaatgcagcccatccgacgcaagcaactgatccacgccaccctggcggccgtggaccaggtcggaatgagcgatgccagcatctccatgattgcccgcctggcgggcgtctcgaacggcatcatcgctcactatttccaggacaagaacggcctgctcgaggccaccatgcggcacctgatgaaggcgctgaaccaggccgttcgcatacgccgcgaggcgcttgccgatgacagtccccgcgcgcacctgaaggcgatcatcgagggcaacttcgacgacagccaggtgaacggtcccgcgatgaaaacctggttggcgttttgggcgttcagcatgcatcagccctccctgcaccggttgcagcggatcaacgaccaccgcctgtattccaatctctgctgcgagttccgccgcgttctgccgaaggagcaagcacgttcggccgcgcgcggaatgtcggcgctgatcgacggcctgtggctgcgcggcgccctggccagcaatgaattcgatattgagcaggcgctgcaactggcctacgactacctggatcagctcctgaccacgcaggtgcactgaccccttctccaatacgcaccgcacgaggatgaccatgccccgtttcgagcaacagaaactctatatcgacggccactatgtcgacgcgaccagcggcgacaccttcgagaccgtcaacccggcgaccggcgaagtactcgccgaactgcaacgcgcctcgtcggaggatgtcgacaaggccgtggccagcgccgccgccgggcagaagatctgggccgccatgacggccatgcagcgctcacgcatcctgcgccgggcggtggatatcctgcgcgagcgcaacgacgaactggccgagctggaaaccctcgacaccggcaagccgctggccgagacccgcgccgtggacatcatcaccggtgccgatgtgctcgagtactacgccgggctgatcccggccatcgaaggcgagcagatcccgttgcgcgacaccagcttcgtctatacccgccgcgagccgctgggcgtggtggcgggtatcggcgcctggaactacccgatccagatcgccctgtggaaatccgcgccagccctggcggccggcaacgccatgatcttcaaacccagtgagatgacctcgctgagcgcgctgaagctggccgagatctataccgaggcaggcgtaccggacggcgtgttcaacgtactcaccggcagcggccgggaagtcggcacctgcctcaccgagcatccgggcatcgccaagatctccttcaccggcggcaccagcaccggcaagaaggtcatggccagtgcgtccagctcgtcgctcaaggacgtgaccatggagctgggcggcaagtcgccgctgatcattttcgaggacgccaatctcaaccgtgccgcggacatcgcggtcatggccaacttcttcagctccggccaggtctgcaccaacggcacccgtgtgttcatccatcgttcgctgcaggcgcggttcgaagccaaggtgctcgaacgcatcaagcgcatccgcctgggggacccgctggacgagcaaaccaacttcggcccgctggtgggcttcgcgcacatggatagcgtgctcgattacatcgagtcgggccgggccgaaggtgcacgcctgctctgcggcggaacgcgggtgaccgagggcgagtacgccaagggcgcctatgtcgcgccgaccgtgttcagcgactgccgtgacgacatgcgcatcgtgcgtgaggaaatcttcggcccggtgatgagcatcctggtcttcgatgacgaagcggaagtcatccgccgcgccaacgacaccgactacgggctcgccgcagggttggtgaccaacgacctggcccgtgcgcaccgcgtgattcaccgcctggaagcgggcatctgctggatcaatacctggggcgaatcgccagccgaaatgccggtcggcggctacaagcaatccggcgtgggccgcgagaacgggctgatgaccctgacgcattacacccggaccaaatcgatccaggtcgaactgggcgatttcgcctcggttttctaagggctacaggcggcaggcatcaggctccaggctgaacgagccacctgaagcctgtggcctgccgcctccgcaggagagctttcatggaatacgactacatcatcatcggcgccggttcggccggcaacgtgctggcaactcgcctgaccgaggacgccgatgtcagcgtgctgctgctcgaagccgggggccccgactaccggatggacttccgtacgcagatgcccgccgcgctcgcctttccgctgcaaggtcggcgctataactgggcctacgagaccgaccccgaaccgcatatgaacaaccgccgcatggagtgcggccggggcaagggcctgggtggctcctcgctgatcaacggcatgtgctacatccgtggcaatgccatggactacgacggctgggccaaggcgcccggcctggaagactggacctatctcgactgcctgccctacttccgcaaggccgaaacccgcgacatcggccccaacgactaccacggcggcgacggcccggtgagcgtgaccacgcccaagccgggcaacaatccgctgttccgcgccatgatcgaggccggtgtgcaggccggctacccggaaaccgacgacctcaacggctatcgccaggaaggcttcggcccgatggatcgcacggtcacgcccaagggccgtcgcgccagcactgcgcgcggctatctggacatggcccggggccggccgaacctgaccatcgtgacccacgcactgaccgatcgcatcctgttcagcggcaagcgggccatcggcgcggcttatctgcatggcaacagcgacacgccggtaactgtccatgcccgccgcgaagtgctgctgtgcagcggcgccatcgcttcgccacagatcctgcaacgctccggcgtcggcccgggcgcgctgctgcgcgaactcggcattccgatcgtccatgatcttccgggtgtcggcgccaacctgcaggaccatctggagatgtacctgcaatacgcttgcaagcagccggtctcgctctaccccgccttgcagttgcacaaccagccgctgatcggtgcagagtggctattcctgggcaagggcatcggcgccagcaaccagttcgaggcgggcggcttcattcgctcgcgcgccgagttcgaatggccgaacatccagtaccacttcctgccggtggcgatcaattacaacggcagcaacgcggtgaaggaacacggcttccaggcccacgtcggctccatgcgctcgcccagccgcgggcgtgtgcatgcccgctcgcgggacccgcgccagcatccgagcatcctgttcaactacatgtcctgcgagcaggactggcaggagttccgcgacggaatccggatcacccgggaaatcatggcgcaatcggccctcgacccctatcgcggccgcgagctgagccccggcgctgacgtgcagaccgatgccgaactggatgaattcgtccgccaacacgccgaaaccgcgttccatccctcctgctcctgcaagatgggcgaggacgacatggcggttgtcgacggccagggccgagtacatggcctggacggattgcgggtgatcgatgcctcgatcatgcccctgatcaccaccggcaacctcaacgcaccgaccatcatgatggccgagaagctcgccgaccggattcgcgggcgcacaccattgccccgcagcaccgcgccctactacgtcgccggagacgccccgccgcgcaacgcggcgcaggcacagccggttggcacgcaaaaggcggcaagcgttcaggtctaagagctgatgtgggtggatgacgcttttcatccaccaggttcagggtcgcgcgacgtcaactaaacgtagggtggatgacgctcttttcatccaccgttgccccctccggtggatcgccacccgatggatcgatgaagcgtgatccacccacgagcatggcgcgggcccaagtgctcgcccgcatgttcgggatcgtacggcgtcagctcatcgtagggtggatgacgctcttttcatccaccattaccaccgtccggtggatcgccacccggtggatcgatgaagcgtgatccaacctgcgatgcccaggctggcgaaacgcaccgggggcaagcgtcggcgcagaaccggcgccaggccgaacgagccttcagagcgaggctttcaccgccgtcaggccgtcttttccatcttgtgtggtaacgccttgcagccagccttcgagcacctcggggtgggctttgatccacgccttcactgccgcgtcgttgctggcgttcctggccagcacctcgtccatgatggcgttctccatgtcctgggtgaatttcaggttgctcagcagtttgccgacattcgggcactgcgcggcgtagcccttgcgcaccagcgtgttgaccgtcccgctctcgccgaaataggcctcgccacccttgagatacttgatgtcgtactgcacgttcatcgggtgcggcgtccagccgagaaagaccacgcccttgtcgcgcttcaccgcgcgtccgacctgcaccagcatcgcctgctcgctggactccaccagtcgccagtcgcccaggccgaactcgtcctggtcgatcatcttctggatcgacagattcgccggcgcaccggcggcgatcccgtagatggtcttgtcgaacagctcggcgtgtttgtcgaggtcctcgaagcgcttgaccccggcgttccagaccgatgtcgggaccgccagggtgtattcggtaccggtcaggttgacgctgtgctcgtcgatttcaccgctcgccacgaacttgtcgtagttgtcctgttgcgccggcatccagttgcccaggaagacgtcgacctggtccttggtcagcccggcgaagatgatcggcacacccagcgtcatgaccttcggcttgtagccgagcccctcgagcagcaggctggcgatcccgttggtgaccgcgatatcgctccagcccgggtcgcccaggcgcacagtcgcgcactggctaccctcggtctgggcatggagattggtggcggccagcagcatgccgctggccaggattgcgctcagtgtgtgttttttcatgtccatctgccttcgctcttgttcgaatgggttccctgtgcacggttggctggcagccatcgctattcgggtctagggtaacgcgccttgcgctcgagatcgtccaggtcgatgtggttacgcatgtattgctggctggcatcgacccagggttggtggtcccagctggtgcgcttgccgagactcagcgcttcgctgaccagccgccgccggcgctggctggcgagcacctggtcatggatggccgggatatcccaacgctgccgtgcttcggccaggaaggcgtcggcaagcgcctggtgatcgggggaattcatcaggttctcgcgctccagcggatcgctggccacatcgaacagcagacaggggtcctgctccgagtagatgaatttgtaggcgccgcgccgaatcatcatcagcgggctggtggtgccttcggccatgtactcgccgatcacttcgtcatggccctcgtggccggtcaggtgcggcagcagcgaacggccatcgaggggcaggttggcctccagcgtgccgccggccagctcgaccagggtcggcaacaggtcggcggtcgataccgaagcgccgatccgcgccggatcgattcccggggcacggatgatcagcggcacgcgcgcggccatctcgaaccagtgcatcttgtaccagaggccacgctcgcccaactggtcgccgtggtcgccggagaagaccacgatggtgtcctcggccaggccgcacgcttcgagcgtcttcagcagcttgccgacgttatcgtcgatgtagctgcaggcaccgaaataggcgcggcgggcgtctttgatcttctgttcgggcagcgatttaccccatagatcgatgaccttgagcaggcgctgcgagtgcgggtcctgctcatcctgggcgatgtcctggcgcggcagcgggatgtcctcttcccggtagcgattccagtactcctcgggaatcgtgtaggggtcgtgcgggtgagtcatcgagaccgtcaggcagaacggccggttgtcgtcggcgcgaacgaagtcgtagagatactgctgcgccttgaataccacctcctcatcgaaatccatctgattggtacggacgctgggcccggcctgcagcaccgaggacatattgtggtaccagctcagccgcacctcgggctcatcccagttcaccgcccagccgtagtcggccgggtagatgtcgctggtcagccgctcctcgtagccatgcaactggtccggaccgcagaaatgcatcttgccggacagcgccgtgcggtaaccgagccgccgcaggtagtgcgcataggtcggcacgtcggcaggaaagtcggcggcattgtcgtaagcgccgatcttgctgggcagctggccactgaccagggtgaagcgcgatggggcgcagagcgggctgttgcagtaagccgattcgaacaccacgccttcggtggccaggcgcataaggttcggcaccttgatcggcgacgccgggtcatgcatcggcaggatgggagcggccatctggtcggccatgatgaacaggatgttggggcgcttcatatgcgaatggtccatgccttgtttttatgcgaaattgcctggaacacagtctggaccctgtaaatctgcggtaaacccggctgccatatatgcctaggataagcacagctaatgccaaaccggatcgatcagattcccctcgatgcgctgcgggtattcgaatccgccgcacgccaacaaagcttcactgccgccgcgctggagctgggcagcactcagccggcgatcagccagcagatcaagcgcctggaacagcagctggcggttcgcctgttcgatcgcgtctatcgcggcatcgtcctcaccgaggccggcgagcttctactgagttacgtgcaacaggggctggggacgctcgatgccggccttgccgcggtcaccgcacagcagcagcacgaggtgctccaggtcgccaccgatttcgccttcgccgcgtactggctgatgccgcgcctggagcggtttcatcggctgcatccggcggtggatgtcagcctggtaaccagcgaacgcggcctgggggtactgccatcggagacggacgtggccattgtcttcggcgatggccgctccaagcatggcgaggcgcacctgctgtttcacgaggaggtctatcccgtgtgcagcccgctactgctgaaaaatgaggccgcgcccttggcgccggcgaccctggcgcggctgccgctgctgcatctgcgcccggaaagccgctcgcgctggctcgactggagcagtctgttccgcgcattcgggattaccgagacacccggctcgggcatgctgcgtttcgacaattacaccctgctgatccaggcggcgattgccggccagggcgtcgccatcggctggcgtcatctggtcgatgagctcctggcccaggggctgctctgtcgggtctgcgacgaaagcgtgcgaaccgaattcggctattacgtcgtgctgcccgagcgcaaacggcgccagcgcctgatcgacagtttcgtggcctggttgcaggccgaactggcgagcgacggcgcacagggctgaagtgaggcaatccaggcaactcgtgcagacgacgcagcgggggcgcaccattgatgtgcgtcacgcgctagaacgcactatcgcggggcaaacgcgcttgctagagtcaacggccatatttctttttcgtgaccgcaaccgcggtcttccgaggccatctgaatgactgaaaccgtccatggatttcttgcccgcctgaagcagcgcgacccgcaccaacccgaattccatcaagccgtcgaagaggtgctcggcagcctctggcccttcctggaagcaaacccgaagtaccagcaggccggcatcctcgagcgcatggtcgagccggagcggaccatcattttccgcgtaccctgggtcgatgaccgcggccaggtccaggtcaaccgcggctttcgcattcagatgaacagcgccatcggcccctacaagggcggcctgcgcttccacccctcggtcaacctcggcgtgctgaagtttctcgccttcgaacaggtgttcaagaactccctcacttcgctacccatgggcggcggtaaaggcggctcggacttcaaccccaagggcaagagcgacggcgaggtgatgcgcttctgccagtccttcatgagcgagctgttccgccatgtcggcgccgacctggatgtgccggccggcgatatcggcgtcggcgcgcgcgagatcggttacctgttcgggcaatacaagcgcctgtcgaaccagttcacctcggtgctcaccggcaagagcctgtcctacggtggcagcctgatccgccccgaagccaccggctacggctgcgtctatttcgccgaggaaatgctcaagaccactcactccagcttcgatggcaagcgcgtggcgatttccggttcgggcaacgtcgcgcaatacgccgcgcagaaagtcatggagctgggcggcaaggtggtttcgctgtcggattcgggcggtacgctgcatttccctgacgggttgaccgacgagcagtgggaatacctgatggagctcaagaacgtccgtcgcggccggctcgaggaaatgggacggcatttcggcgtgacccacctacccgatcagcgcccttgggggctggcctgtgagatcgccctgccctgcgccacgcagaacgaactcgacggcgaggatgcccgcaccctgttgaacaacggctgcctctgcgttgccgaaggcgccaacatgccctcgacgctcgaagcggtggacctgttccaagaggcgggcatcctgtttgccccgggcaaggcatccaacgccggcggcgtggcctgtagcggcctggaaatgagccagaacgccatgcgcctgcactggaccgccggcgaggtggataccaagctgcacagcatcatgcagtcgattcatcacgcttgcgtggggtatggcgaagaaaacggccgcaccaactacgtgaagggcgccaacatcgccggcttcgtcaaggtcgccgatgccatgctggcgcagggcgtggtttaagccgttcgacgccccgtgttgaagcgcaaaagctcctgccgaatcgttcggcaggagccagcttcctcgacgcttgcgtgatgatcggccttcttttcccagcgagaagctgctcgcatcgccgtgcagccttcaccgcgcttgttcttcgagcttccggcgtccagctccctaccaataattctccaccgccacctgccctggccgccgggtcaggctgaggttgagatcgcgctccttgagcatggcgcgggtgtcttcgatcatctgcgggttgccgcagagcatgatccgcgaatgctctggttccagcgcgaggcccgcggcgcgttccagctcgccgttttcgatcagcgttgtgacgcgtccgtgcagcgcgccgggaacctgctcgcgggtgaccaccggcagataagtaagcttcgagcccaggccttcgaggtagtcgcgctgcggcaagtcgcgaatcagcgcctgataggccagctccgacgcggtacgcgcgctgtagaccaggatgattcgctcgaatcgctgccagacctcgaagtcctgcagaatcgacaggaacggcgcgagcccggtgccggtacccagcagccagaggtcacggccgtcgatgaagcgatcgagcgtcagaaagccgaacgcctgtttgtccaccagcagctcgtcgccgggctggaggcggctcagctcgctggtgaactcgccgtccggcaccacgatggagaagaaatcgagaaattcgtcatggggcgcggagaccatcgaataagcacgccagacgatgctgccgctgggcttgcgcaccccgaggcgggcgaactggccggcggtgaagcgaaaccccgggtcacgcgtggtgcgcagggtgaacaggttgggcgtcaacgtctgcacctcgagcagacgctggcgggtgaacttctcttcgctgacggtcatacttcgctcccttcgcggacaacttttcgatttcgagggttgctcaggcttgggaaaacccccaggcgaggctggcaagacaaggcaacgacccgcggaaacaacagccgacggccggcccgcaggcgagcgtagcgagtcaaaacagccggcaagcggaccgggctcgcgtgcgagtagatttcccgatgaacatgactcactcctctcgcgcttgaagcgcgtggatcacgagcgatctccgaggctgttttaacgcgtattgccaacgcggctagtttctcctcgatttgaacccttgatactccattccgacgcccacaaacaccgccagttcttatgcctattctcgaatcgccctacgcccgcctcgacctgatccgccagcccgagcagcccaacgagccgctgcaggccttcgacgcggccgacgagtacctgctgacgcaactgcatgagcagcaattgccggcaggcagccgcgtgctgatcctcaacgacagcttcggcgcgctggcctgtgcgctggcgcagcaggccgaggtcaccagcagtggcgattcgcacctggcgcacctggcgctcgagaagaatcttcagcgcaacgggctcgccaccgacagcgtgaccttcgttcccgctagtgaggccgtacaaggcccgttcgaccgggtactgatccgcgtacccaagaccctcgcgctgctcgaagaacagctgatccgcctgcatggccagctggcacccggcgcccaggtaatcgccgccgcgatgatcaagcatctgccgcgtgccgctggcgacctgctggaaaagtacatcggcccggtgcaggcgtcgctggcggtgaaaaaggcgcgcctgctaactgcaacgccggtccagaaagccgctcccgtctcgccctacccgacccgctaccggctggatcagccggccatcgaactgctcaatcacgccaacctgttctgccgcgaggacctggacatcggcacccgcgcatttctgccgcacctgcccagggcgctcggcaacctgcgagtggcggatctcggctgcggtaacggcgtgctcggcatcgtctacgcactgggcaatccgcaggcgcaactgacgctggtcgacgagagctacatggcggtgcagtcggcgcgggaaaactggcaggccatcctcggcgaccggccggccgatatccgcgccggcgatgggctggccgagcagccgatggattcgctggatctggtgatgtgcaacccgccattccatcaacagcaggtggttggcgatttcctcgcctggcgcatgttcacccaggccaagacggcactcgccaggggcggcgagctgtggatcgtcggcaaccgccacctcggttaccacctcaagctcaagcgcctgttcggcaaggtggagcaggtcgcggcgacacccaagttcgtcatcctgcgggcgatcaagccatgagcgaggcaccggttcggctgagcatccagcagttcgcggcacgcaccgggctgtccgccgacacgctgcgctattacgagaagatcggcctgctgcgccacgttgcccgcgacgccagcggctttcgcgtctacggcccgcgtgatctcgagtgggtggccttcgtcctgcgcctgaaggacaccggaatgccgctggaggacatcacccgctatgccgacctgcgcgaacagggcgagacgacgctcgcagcgcgccaagccctactcgaagcccatgccgccaggctgcaggcgcgcctgcaacgggaccaggaacacctcgacgcgctgcaggcgaagatcgagctgtaccgccggcaaacaatcgcttgacctggagttgactccaacccgcaggctttcctctacccaatcgagaggaacctcccatgtttgcaacgacccgctacaccgtaggcctggccaagctcgaagaaatcgacggcgaggccggccgcaaggtcatcgacagcctgcaagccatcgccccggatctggcgcgctacgtcatcgagtttcccttcggtgatatctaccagcgccccggcctcgacctgccgcaacgtgagctggccaccgtcgccgcgctgaccgcgcttggccactgccagccgcaactggcagtgcacatccacggcgcgctgaatgtcggctgcacaccggagcaggtgatcgaagtgatcatccagatggccgtctacgccggcttccccgccgcgctcaacggcatgacaacggccaagaccgtgtttaccgaacgcgggctgctgaccgcctcgacgccgaatgcgagctgaacggagtgggcgggaagcccaccccgtgggaacggtcttgaccgcgaatgaccccggcacatcggacacagcccatcacgccgaagggcccagcccagctaccactgccaagccaagcccgaacccgtgggagcggtcttgaccgcgaacggcgctggcacaccagacacagcccatcacgccgaagggcccagcccagctaccactgccaagccaagcccgaacctgtgggagcggtcttgaccgcgaacggcgcaggcacaccggacacagccccaccgcacagatggctcccagcccaccctatcgatcccgagacaagcctgccccccctgttcggggatcgggctattcgcggtcaagaccgctcccacaggccaccgcatcaccaccaccaccaccaccaccacaccactacaccgccgaaccaacgcacaacggcatcaccaagccaccgccccgtcaggccagcggcagcatgctaccctgcccggccctgcctccattgcgcctgcctgatgtccacccacgccaagttgctgttgcgccaccaacgcccctttatcaagttctggttcgcccgcgtcttcaccgcgagcggctttcagatgctcgccgtggccattggctggcacatgtatgcgctgaccggcagcgtcctcgacctgggcctggtcggcctcgccgaattctttccgcgcctgctgttcgtgctctggaccgggcaggtcgccgaccgcttcgatcggcgccggatcgccgcgctgtgccaggggttgcaggggctgatcgcgctggctttggtgctcggcgccggcgggctcggggtaacacgggaaatgatcttcgtgctggcctttttgctcggtaccgcccgtgccttcgaagggccggcgacccaagcgctattgccgagtctggtgcccacgcagctatttcccgcggcggtcgcggcttcgtcctcggcgatgcaatcggccaccatcgtcgcgccggcgctgggcggcctgctgttcgccatcggtccactatgggtctatggcccggtggcgctgcttttcgccctggcctgcagcctgatgctgagcctgccaaaacgccccgcgccaccgaagcagacaggtcctgcgatggacaacctgctcgccggcatgcgtttcatccgcagccggccggatattttcggcgccatctcgctggacatgttcgccgtgctgctgggcggcgctacggcgttgttgccggtgttcgccaaggacatcctgctcaccgggccctggggcctcgggctgctgcgctcggcgccggcggtgggggcgctgctgatgtcgctgtggttggcgcgctatcccatcaacaagcgcgtcggcagggtcatgttcgcggccgttggggtgttcggcctggcgaccatcgccttcggcctgtccacctcgttctggctgtcgctgggtgtgctggcggtactcggcgcggcggacatgatcagcatggtgattcgcggcgccttcgtgcagctggaaacgccagacgccatgcgcggccgggtcagcgcggtcaacggcctgtttatcggcgcctcgaaccagctcggcgaattcgaatccggcctgaccgcccattggttcggcaccgtaccagccgtggtgatcggcggcgtcggtacgctactcatcaccggcgcctggatgaagctgttcccgacgctgagagaccgggaccagttgcatcgggatctgggatagcggcttcaggcttcaggcttcaggcttcaggcttcaggcttcaggcttcaggcttcaaagtgtgcgcggtggcaccaaagcaacggcaagcgcttttatgcttttgcctgccgcctgccgcctgccgccctaaaaaagcttatccaacgtaatcggcaaatcccttacccgcttgccggtggcgtgaaagatcgcgttggccactgccgcaccgacgccgacgatgccgatctcgccgacccctttcgaacccagcgcgttgacgatctcgtccttctcctcgacgaaaaacacctcgatgtcgttgatgtcagcgttcaccgggacgtggtattcggacaggttgtggttcatgtagcgacccagcctgtggtcgatcatggtttcctcgtgcagggcctggccgattccccacaccacgccgccggcgatctggttgccggcggtcttgggattgaccacccggcccgccgccacggcgctgaccacgcggctgactttcacggtgcccagggattcgtccacgcgcacctcgacgaagatggctgaatgtgtcgcagtagagtagccgttgcgcttttcgccgggcttgaggctcacctcggcttccagcacgccgctcacggcgacgacctgctccagcgcaacggccgtttcgggtgaagctttcaggcgcatctggccgttggcgaactcgacatcctcgagcttcgccccggtaaagggcgaaaccggcgattgctgggcggcgtcgagcagcttctggcagagcgcttcacaggcttgctgcaaggcgctgccgacagacgacaccgtggccgagccgccttcgagcggcgcctgggacaggctggaatcgccgaggcgaaactcgacccgctccatcggcatgccggtggcggccgcagcgatctgcgtcatgaccgtgtaggtcccggtgccgatgtcggaggtggcgctgctgaccacaaggcgtccatccgggcccaggcaggccttggcgctggccggcatctgcatggcttcccagacgccggtggccataccccagccgatcaactgattgccttcgcgcatggagcgcggcgccatggagcggcgtgaccagccgaaacgctcggcgccctgctcgtaacactggcgcagctccttgctggagtacggcttgtcctcgttgccgttgcgctcggaatagttgactaggcgcagggccagcgggtcgacgttcgccgcataggccagctcgtccatggcgcactccagcgcaaatacgccgatggtcgcgccgggggcacgcatgtccagcggcgtgtagacgtcgagcggcaccagctgatagtccagctttacgttcgcgcagctgtagagcatccccgaccactcaacctcgtgttcggtgaagtcctcgaaggacgaggtctggccgatggcgtgatgggtgatggcctgcaaccgaccgtccgccgtcgcgcccagcgagagacactgaaccgtccgcggccggtagccgaaggtgaacatctgctggcgcttgagcgcaacgcgcaccgaacgcttgagtttgagcgccgccatcacggccagcggcaactgatactgcgggcgcaagcctgaaccgaaggcaccgccgacgaacggcgagaggatgcgcacccggcccttcatgtcgaatatgttttcgacgtagcgcatgcagttctgcacgccctgggttttttcgtagatctccagcgtgccgtcgggcaggtagtgcaccgtcgaggcgtgcggctccatcgggttgtggtgttcgaccggcgtgctgtattgcacctcgaccttcaccgcggcgctctgcaacgcctgctccacattgccacgcggcggcggcagctcggccggtgccttgtgcatgctgcccagctcgctgagcaggtcggtgcgatgggattcggcttcgtactcgaccttcaccaggctgccggcgtagcgcgccagctccaggttgtccgccaccaccagcgcaatcggctggccgctgtagaggatgcgatcgttatatagcgggcggaacggcgagccatcggcggcatcgtcgtcttcgtagggtttgtcatagctggccacgggcgggcggttctggtgggtcagcaccagctggacgcccggtacggcttcggccgcgctggcgtcgatagagacgatgcgcccgcgcgcaatgctgctgttgaccacgctgccatagagcagaccgggcacatcgaattcagcggcgtattgcgcctggccggtgaccttgagcggaccgtcgacgcggtcgagcggctggccgaacggggaagtggcaggtttcatcgggcggctcctttggcagcgtcggtcagggcgcggacgatggcgcggtggcccagttcgatcttgaaggcgttgtgttcgaagccgctggcgccttcgaggaggatatccgccgcagcgctaaaggcggcctcgtcgggcgccttgccgaccagcgcagcctccgcctcggctttacgccagggtttgtgggccaccccgcccatggcgatgcgggcgctgcggatgcctgcaccgtccatatccagagcagccgcgaccgaaaccagtgcaaaggcgtaggaggcacgatcacgcaacttgaggtagctgctgtgcgcggagaagtcctgtggtggcaactcgacggcggtgatcagctcgccatcgaccagggtgttgtcctgctcgggcgtttggcccggcaaacgatggaagtcggacatgggaatgcgccgctcgccccgttgcccttgcacgtgcaccaccgcctccagtgcggccagtgctacgcacatgtcggacgggtgaacggcaatacaggcctcactgtggccaaggatggcatggatgcggttgaggccgtcgcgcgcggggcacccactgccgggctcgcgcttgttgcacggcgtggtggcgtcatagaagtagtagcaacgcgtgcgctgcagcaggttgccgccggtggtcgccatgttgcgcagttgcggcgaggcgcccgcgagaatcgcctgggacaggagcggataacgcgcttcgacgattggatgccaggccagatcggcattgctgacaagggcaccgatgcgcaagccgccttctggcgtctgctcgatatcggccagcggcagctgggtgatgtcgatcagctgcgacgggcgggtgaggttttccttcatcaggtcgagcaggttggtgccgccggcgatatagcggctgtcgggccggaactgtgcgatggcgtcttcgatgctgacggggcgggcgtagctgaagggattcattgcgtcacctccttcgcacccgcgagccgttcgcgggtctcgtccgcggcgtcctcgatggcggcgaggatgttcggataggcgccgcagcggcagacattaccgctcatctgttcgcgcaagtcgtcacggctctgggcgcgcccctcgccgatcatgcccaccgccgagcagatctgtccgggcgtgcaatagccgcactggaaggcatcgtgcttgacgaaagcggcctgcatcgggtgcagcgcttcgccctcggccaacccttcgatcgtggtcagttcggcgccgtcgtgcatcaccgccagggtcaggcagctgttgatgcgcttgccattgagcagcaccgtgcaggcgccgcattggccgtggtcacagcccttcttggtaccggtcaggtgcagctgttcgcgcagcagatcgagcagcgtggtccaggggaaaacctcgacgtcgcggcgctggccgttcagttggagggtgatggaacaggcggagatcccacctgaagtggatgacgtttcgctcatggcagcctcacggttggggggctccggctgcctgttctgcgcaggatcgccgaaaacctcaggcactagggctacgactgccccggcggaaaaatcgttcagcgggatatcggaggcctcggggcgccgctcggctcaacccggccgtcgatcctccggacgatcgatgtcctgcaacaccgcgggatcgtccacttcgatctcgatcaccgaaggcccatcgaaaagcgcctgcgcgccccgctcgccggtcagcacgcgcaacaacgcaccgaagtcggcccctattccgcgcggatgaccgcgctgcccgcggtacaccggcaccaccaaccgttgcggctgaatggctgcggcgatgcgctcgagggtgtcgcgttgcaggtacggcatgtcacccagggccaccagccagccgcggcgggtcgggcagcgcgacaccgcctgggccaggctgtgccccaggccgttgctgcgaaccaccagcgtttgtgcgccgaaggcgtgggcctcgcgctcgagccaggcgaccaggctggcgttgtcctcgcgcgtcaccaccagcagacgatcaccgatgccggccactgcgcgcagcgtggctgccaggaccggcggcgcatcgacggccgacgtacagccggccagcagtttgtcctcgtcgctgtattggcggtaacggctgccttgtcccgcggccaggacgatggtgcacaaatcgtcaggcacagcgccgctccgtcgcgactcgttcgcgcgccgcgccattcttgatggccaccacctgagccatgagcgacagggcgatttcggccggcgtgcgactgccgatcggcagtccgatcggaccgtgcagccggttcacgtcgccttcgctgagccccagcgagagcaaccgggacttgcgcttctcgctgttgacccgcgagcccagcgcaccaacgtagaaggcatcggactgcagcgcggtgagcagcgccatgtcgtccagacgcgggtcgtgggtcagcgccacgatggcggtgtgggcatccggctcgatggccagcacggcatcgtccggcatgcccgccacgaaacggacggcggtgtcgccccagtcgtggccgtagccttcacgggggtcgcagatcaacacctcgaagccgaggccgcttgccaattcggcggtatagcgcgacagctgcccggcgccgatcatcagcaggcgccaggtcggaccgaagggcgcacgcagggtcgcgccatcgaagtgcagcatctcgttgcgcccggctggcaggagagtcaccacgccgctggacagatccaggcagcgcaacaggcgttcatgatcggcgcagcgctgcagcagttcgtccagccaacccacgtcggtcagcggctcttcgagcaggcgcaaggtaccgccacaaggcaggccgaaccgcgcggattcctccttgctgacgccataagtgatcagctcgcacgcggcaccgcgatcggccaccgcctgtcggcgcgccagcaggtcatcctcgacgcagcctcctgaaaccgaaccttcgacgcgcccgtcatcacgcagtgccagtagcgcgcccaccggtcgcggtgcgctgccccaggtttccagcaccgtgtagagcaccactgcatgcccttcacgcagccagtcgcgggcgcgtcgcagcacccccagatcgacactgtccatcgttttccccgtgaatttccgacgatgcgctggtcgcgccgacatgtcttcaatgactggccgcacgacaggttagttcgcccgcggcctatcgatcgcggatgagcaatgcctctggcaagcgcaaccgggaagcgaaaccggccggtcaccgaatgaaattcatcccggtgcagggtcggtgtaagatgcgcggcttttgcgagcaacgcctggatgggctttgctatagcaaccaactgcccaaagaggcagccaccacgcacactgccagccctgaccggcccacacgaggattgaccatgctggagaagctgttccaactcaaggcgcacaacaccacgctgcgcaccgagatcctcgccggtctcaccaccttcctgacgatggcctacatcctcttcgtcaacccgagcatcctcgccgagaccggcatggaccacggcgcggtgttcgtcgcgacctgcctggccgctgccatcggttcggcagtcatgggcctgatcgccaactacccgatcgccctggcgccaggcatgggtctgaatgccttctttacctacaccgtggtgctgaccatgggctacacctggcagacggcgttgggtgcggtgttcctctccggcgcgatcttcttcctgctgtcgatcttcaagatccgcgaatggatcatccacagcattccgctggcgctgcgttcgggtatcgccgccggtatcggcctgttcctggcgatcatcgcgctgaagaatgccggcatcgtcgtcgataatccggccacgctggtgggcctcggcgacctgaccgccggcggtccgctgctggcctgcctgggcttcttcctgatcgccgcactggcctaccgcaacgtcactggcgcggtgatgatcggcattctcgtagtcacggtgctgtcgatcgtgctcggtctgtccgaactcaacgccgtggtgtcgatgccgccctcgctgatgcccaccctgctgcagctggatatcgccggcgcgctggacatcggcctgctgagcgtcatcttcgcgttcctcttcgtcgacctgttcgatacgtccggcaccctgatcggcgtcgcgcagaaggccgacctgctggacaaggacggccgcatgccgcgcctgggccgcgccctgctggccgacagtaccgcgaccatggccggcgccgcgttgggcacctcgaccaccaccagctacatcgaatcggcagctggcatcagcgccggcgggcgcaccggcctgactgcctgcgtggtcgccctgctgttcctgctcagcctgttcttcgcgccgctggctggcgccgtgccggcctatgccaccgcgccggcgttgctgttcgtcgcggtactgatgatgagcagcctggccaacatcgactgggacgacctcaccgtcgccgcgccggtggccatcgccgcgctggctatgccgctgaccttttccatcgccaacggcatcgccttcggcttcatcgcctggacggccatcaagctgctcgccggccgctggcgcgacctgagcccggcgatgtgggtgctgtcgatcctgttcgtgatcaagctgggcttcttcaacggctgacgttcgtggagtggatgacgcttttttcatccacctttcatacggagacggtggatggatgaagcgtcagctgcgcgcccctatccaccctacgattcattactgcacgagtttttatgagccgcccgcatttcgaccccgccacctacgatgcccaactcgccgacaagacagtaaggctggtggaactgctggcgcccttcgacgcccccgcgccagaagtcttcgattcgccacgcgagcactatcgcctgcgtaccgagttccgcctgtggcgcgacgacggccagcggcattacgcgatgttcgagcccggcgacaagcacacaccgatcctgatcgacgacttccctatcgccagccgccgcatcaaccagttgatgcctcagctcaaggccgcctggcaagccagcgaaaccctgagcttcaagctgttccaggtcgagttcctgaccacactctctggcgatgcgctgatcaccctcgcctatcatcgcccgctgaacgacgcctggcaggccgaagccgagaggctcgcagcgagcctgggcgctagtatcgtcggccgttccaagggcaagcgcatcgtcatcggacgggactatgtcaacgagcaattgaccgttgcgggccgcgtcttcagctatcgccaacccgaaggcgcctttacccagcccaacggcgaagtgtgtcagaagatgctcaattgggcgtatgacgtgcttggcgagcgcagcgacgatctgctcgaactctattgcggcaacggcaacttcaccctgccgctggcgacccgcgtgcccaaggtgctcgcgaccgagatcagcaaatcctcggtcaatgccgctctggccaacctcgatgacaacggcatcgacaacgtcagcctggtgcgcctgtccgccgaagagctgacccaggcattgaacgaagtgcgcccgttccgccgcctggccggcatcgatctgaagagctacgacttcggtagcgtcttcgtcgacccgccacgcgccggcatggatccggacacctgcgagctgacccggcgtttcgagcgcatcctctacatttcctgcaacccggagaccctggcggcgaacatcgcccagctgcacgatacccaccgcatcgagcgctgcgccctgttcgaccagttcccctacacccatcacatggaatcgggcgtgctgctggtgcggcgctgagcctcgcccgagattccgcaaagcgatgaaccaccgcagctgacgggactttctgttccgtctgcctgcggagccctcgccaacggagggcgaaccgccacgcatcagccagacgggctggttcgaacgcaagccccacgaagtgagcgaagcaaagttcagtagtcggcggccgcgccaactgtgtggcgtatcaccgcgacgccgagcggggcgacttcaacgaacaccgggttgcgatcccgcgctgaagcgcgacagccggagctgcttgcgatccgaccgccccgaacacgcctgtcgtcagctggtcagcgtcctccgggcagcgactgaacgagtgcggagcacgcctgcccccacccgaaccggctcagtccttgccttgcggcaccggcctgtcggactttccgatgaccgccacgcccgtcgtcttaccgtcacgctcgcgctcaccgctggtgttggccagcaggctggtggtcgcggtctgcaggaacgcctgcagctgctcagccatcagcggatcgatctggtccgccttgagccgttgcgcctgcggctgaccaccgagttgatagcggtacaagcgcggttcctggtccttgggctgcaccagaatctggtcgccccgcaccattgcgacggtctggtcaccgcccgacggcttgatgatgccgaaaccggggtcatttgccggcagcgccagcagatcgcgtccccagcactggtgacgaacctccccgccgagacggcccatgatggtcggcaccatgtctacctgcgtgccgaccacgtcacggcggctgccgaagcgctcggtcacacccggtccgatcagcagcatcggcacgttgaagcggtacaggtccatctcggtcaactgttcggtagcgccaaagccatggtcgccgaccaccacgaacagggtctggtcgaaccagggtgccttgcgcgccttctcgaagaactggcccagcgcccagtcggaataacgcatcgcagtcaggtgctcatccagcgagccgtgccccgttaccggctcgaccggcagcgggtcgggaagcgcataaggcgtgtggttggaaagggtctgcaacagcgcgtagaagggctcgccggtatccagcttgtccagctcttcgatggcgcgaccgaacatgtcctggtcggatacgccccaggtcgggtcttccaccaccgggttgatgtattcgttgcggccgacgaagcgtgtcatgccctggttgccgaagaagccggactggttgtcccaggcgaaatcgccgttatagacatagacgtcgttgaatccccggccgccgagcaactggggcaagccggaaaaacgatgcccgccctcgggtgtctgcatcaggtattcgaagccgggcaggttcgggaagcaggccatgctggcaaacatgccctggtgggtgtgggtgccgttggagaaaaagcggctgaacagcagcccgtccttggcgaggcgatcgaagtacggcgtgatgccgtcctggctgcccagcgcaccgacgaagtgaccagcgaaactctccatcaggatgaccaccacgttgcgcaccggcagctggccgtccgccggcggctggtaatcgcgccgcacgggtgccagctcggcatcgaccagtgtgtcgttgtcggtcagcagcagcccacgggtgacggactgcgcctcctcgggcggcaaggtcgccttccaggtattttcgcggtggctcgaatagcgattcttggccgcgtcgtagagcgacaacgtgccgttcaggccaagatggttggcgaacatcgaatcggtggtgtaggcatcgccccagcgtagcggcgacccttggcgcagcgtgccgcgtgcggccaccacgcagaccagcaccagcagcgtgaacaccgccgcacgggtgtaccagggcgcgccgttgcggcgcacgcccgtcgagcgcaacgccgggcggccgcgcgtcaggcgttccaaccagccgaacagggcgaacatggccaggctcgccacaccccagaccgccaacagccggaggaccggaaagccgttccacagcatgctcagcacggtcgtcggatcttcctgcagatactggaagaccaggccgttcagccgctggtggaattcacggtagaagtccagttcgatcagcccgagcagaatcgccaggctggcgcagacggtcagccatgcgcgcaacagaccgcgggccgccatcacccggacgctcaaggtgccgagcagcagcggcaacagcgcatagaccaccacgcgcaggtcgaagcgcaggccgttgccgaacgcctcgacgaagttgtcgaccggcgtgttgccgatcagctcgcggttgaacagcagcaggcccaggcgcaacagagcgaacatgaacagcagcgtcagcgcgctggccaggatgaagcgcaggtgcgcggccagggtgatggggccaggcgggttgaggtctcggctggaccgccgcgaggtggagcgcatggattttccttagtgaaggcagaagacgtatgggaggtggctcagagcaggatcaccgcccacaccagaccgatcagacagagcgccagcagttgcgcggcgctgcccatgtccttggcctgcttggagagcggatgcagttcgagggaaatgcggtcgacggtcgcctcgatggcggaattcagcaactcgatgatcagtgccaggaacaccacgccgaccagcacggcacgctcgacgcggctgacatcgagcaacagcgccacgggtatcaggatcaggttcaacaataccagctgacggaacgccgcctcgccgcggtaggcagccttcaggcccgccatcgaatagccggaagcgtgccagatacgggccaggccgctgcgtcctttcatggcagcgccgtcgctgaccagaggtgtcggttccggtgccgtcactgggctcctccatgtgcaaaagccgcagcatgcgcactttgcagcaactgccaatctgtctcgggcatcgcatcgcgatgacgcgcgagctgccgcatgtcatggctggcggccgcacgggaacgcagacgccgacggctcttttccagatcaagcagtgcgatttcgatcagaacggcatccgcctcgccactcaccttgatgaagatgtgcttggggtaacagcagccgtgttgccagcgggcccgatggtaacggctcagcgtgcggccgacggcctcgagcatgtgttcgtgcacgcgtgtgccgtagcgctggtccaggcggtcttcataccactgttcgagactgacgaagccgtccagctcttcggtgaccagcagcgcctgccactgccccgcttgccgttgagtaccgcagaacgcgatggccggcactcgcacgccgaggcgtgagaaggcctgcaacgcgtcgcgctcacgcagcacggtaggccgtccgagcggatgccacagcgagcggtacaggtggccgatctgccgtttgcagtagagcacgccgcctcgacgagccttcagccgctgtaccccgctctcaccgtcgcggcgcaggttcggtggttcgacccactcgccctgcgtgttccaccattgctcgaaatcatcgacggcctcgaccggacgcgggagaacgacagcagccatgctcagctccttttgcgcaacacgtagacacgccacatggcgtatcccgggagaaagtccctgtggcctacaatgtcgaatccggcctcgccgaactccgcctcgatcttcgagcgcggaaccacgaatctatttttgttttcttggtgtggacgccggcgctccaggcgcttgcgtttccaggccttgtaattgccatcgacccagagcgagaggataaccgtgtcgcgagtgacccggtgaaattcgcgcagcatcgtcaggcgatgcgccggatcggcaatgtggtgcagcaagcgcatgctgaagatgcagtcgaccgcgttggcacccatgtcgatggcgaaggccgaagtttgtaaggtttcgacgcgtttgaccacctccggcggctgggcggcttcggcgatcgccagcatgtcgggtgagttgtcggctgcaaggatcatgcggctggggtgctcggccagcagcggccagaatcgaccggcgccacacggcaggtcgagcaccaggtccggatcgccggcctgtttcaatgcatggcgcgccagctgcacgtcccgccagtgcgacagacgcctggccaggccgtcctggtgcttgtgcaggtattcgcgggcgtggtcgtggtcgtacttgcgcgagaactcgagctcgatcgggctggctttggtcatggcgtgcgtccggtaacaggtcagacccgcacgctaacgaggccaggatcaagcgaccgtcaacggaatgtgaaaaaaacgtcaagcgacgaccggctggaagcacacacggaagcagcttccgaccgacgggttcgggcgaaggctgaccgaccacccctgatgggcgcagatcctgcgcaccagcgacaaccccagtcccagcccctcgccacggctctcctcgccccgcacgaacggctgaaacatccgctcctgctggtccaccgggatgccgacgccggtatcctcgacgcgaaagccgccgttttcgatgatcagccgcaccgatccggcctcggtatagtgcagcgcattgcgcagcaggttcgacatcaccgagcccagcaacgtggcgttgtattcgccgctgtcctgcccctcctcccgcacatcgaaggccaggcccttttcctcgaacagcgcctgccaacgctcggcctggtcataggcgacgctggccagactggccgtgccacggaagacgctctgctcgggacgcgcccgggccagcatcaggaatgtttccaccagctcgtgcatctcctgcgccgcgcgctcgatccgctgggcctgtgtccgcgacttggccggcagatcggcctgggtgagcagttcgcaggcgccgaggatcaccatcagcggcgtgcgcagctcgtgactgacatcgctggtgaacagccgttcgcgctccaggctctgccgtagctgacccagggtgctgtcgaaggcggcggccagatggccgacctcatcgtccgggtactgcaaggccagcggcggagccaaggcatgcagttgatcgcgatggcgcacctgctgagccaggcgtgacaccggcgccatcaccttgtctgccatcagccgccccagcccccaggcacccacgatgctcagcaggaagcctgccagcaccacgccgaacagcgccgtttcgcgtgcctcgaactcctgctgctcctcgaccagcatgtatcgctcgccgtcgatctcgcgcaggtaaacgtagtaggcgtcgtcatggctgatcacttcggtgaagccgggagccacatctcgaaacgcctcgggaatctcgtatcccggcacatccgaggcgaagaaacgcgtagccgcatccagtcgcggcgcggtcttgagcacgagcacatcattgagcacaccatccagctcgccgcccaactcctgcgtgacgaggtgctcctcgatgaaatgcaccaccgcaacgatgcccagcgagaatacgccactgaccacgaacgtcatcagggtgaaggcgatgacgatacgccgcgcgaacggctgcttagtcagcatgatcgagctccgccagacgaaagccgacgccatgcacggtatgcagcagcggcttgtcgaagggtttatccaggacctggcgcaactgatgaatatggctgcgcaggctgtcgctgtcgggaacgtcgtcgccccagagggcttcttccagttgctcgcggcgcaccaccgcggggctcttctgcatgaggacggtgagcagcttgtgaccgatcgggttcagccgcagcgagtgcccggcccgtgtcgcctgcagggtatcgaggtcgtactgcaggtcgccgacctgcagcttctgcttgcgcgcgccctggctgcgccgtagcaccgcctcgatgcgcgccaccagctcggacagcgcgaacggcttgatcaggtagtcgtcagccccggacttgagcccttgcagccggtcgtccagggcatcgcgggcggtgagcatgatgatcggcgtgtcgcgcccggcatcctcgcgcaaacgcttgcagacctgatacccatctattccgggcagcataatgtccagcacgatcaggtcgtagtgcgccgtcgcggccagatgcaggccgctgagcccatcctgggcgcagtcgaccacgaagcccttgagttcgaggtagtccagaacgttggccaggatgtctcggttatcttcgatcaccagaatgcgcatatcgactcgctagcggaacaatgacggaattttcacggcttctttacgacggcctcacaggcaggtgctcagacttcggcgggtccggcctcgcccgtggatcatatgatgacatctgcgcgccctgcttgacttcgttaccgctcgcttgccgaggcgacacgcctcttccggttgcctctcatctcggccagcgttgaatcttgccggcgccgctcatggcgcttctccggagccccaatgcctgccatgcccaacaccgccctcgacagccgcccgttcaacttcgccctggccttcggcctgccgttgctggcaatgctggtgctgctgctcggtgacccgagccagctcgacttcgctctgtcgcggctgttctacgagccgggctcgggtttcgtcggccgccacagctggttgctcgaagacgttttgcatgaccgcgtcaaacagctggtgatccttctagcagtgctggcactggtcggtttcgtcctcagcctgctgccgacgcggctggccgcgtggcgtcggccgctgggctgcctggtgctgtcactggcactgtcgaccagcatcgtcacaccgctaaaggcgctgaccggcgtgcactgtccctggagcctgaccgacttcggcggcagcgagacctacacaccgctgctcagcgaacgggcacccaccctcaagccaggacgctgctggccgggtggccatgcgtcggcgggcttttcgctgctggcactgttcttcgtcctgcgcgaccggcacccgcgcgcggcgcgttacgcgctgtccttcgcgttgacgctcggtaccgtgctgtcgatcggacgggtgatgcagggcgcgcacttcatgtcgcacaacgtctggacgctgctgttcgactggctgatcgggacggcttgctaccggctggtgctgtaccgccgtatcgcctcaccggcgatggcgccggccatcgacgccgctcgctgacagccgattgccgcgcagccaagcgggttgcgcggcgcggcttacgcctcgttgcatagtcgggacatagagccgccaagacgccgcttagcggcgatggtaggcctgcgccttggcctgatcgacatgatggcgccactcgcgatcgcgctcacgctccagcgcgtcgctgcgccaggccgacaacccgccgctggactcgagcatcgcctggcactggcgataaccgtcgccccagccttcgctatacagcggctgcgcctgggcgcgcgacacatccttgcgaaaggaggccatccccgcggccgcctgtcgcgcgctgtcacagccggcttcgaagccgtcggcataatccaccggataaccctcggcgagcagcccttgcgccgtactctggcaaccggcaaggcctgcgatactggcgcacaacaatgccagcaaacccaggcgagcgccgggcagcacgcgtcggcatgtgatgagacgggcggaatgcgggagacgaacgttcatcggttacctcacctgaagcacaggacagcgccgcggtgcaatgcgcgccgcggccacagtgcaaagcctgcgcctgccgtcgtcagggtttcgtcaaaccgacgtgaatgaagcgtgaaaacaaccggcgggcctagtgacccgggcggcggaagctgtagaacaggttgggttcactgaccacgtagagcgtgccgtcgtcgtccagggtcacgccctcggggtgcggtgcggtgtgctggaggtcgctggtgaaccggttgaagctgcggtaactgagcatcttgccgctgtcgctgagctccatgaccaggtgcgattcatcgctgaggagaatcaggtggccggtttcggcatcgtaatggatgtccgacaggtcggtggcaaagacctgatcgtcgatccagtcggtgtggtcgacaatcgccagctgcaacgggccgtcgaggctcgccgccacgcctttcacttcgtatagctgacgagggtcacgctccttgacgatgaacatccggtcgcccactgcgtcgtagctcaagccctcgaagcccttgttgccgttgaggtggatgcccagggaaaaaaactgcgcttcggacacgtcgatgctgcgcggcgcagctggcagggtgaaaacgctcacctgctgcgcgcgttcatccgacaccgcgactcgcccgccgcccatgtaggtcacgccttcgatgtcgccgaagccggtcagcggatagtgttcgagcagctcgccggtcttgctcagtaccagcaactcggtggggccgccgttgactaccgccaacaggcggtccagatcacggtcataggtaatggcagacaagttgcgctcgacgcccgcgatgggcttgccgtcaatctcgacctcgtagccgggcagccagcgatcagccgagacgtcgtgcgtgacgtccatctgccgggtcatgtagaaatacagccgctcgttccagtgcagcgccagcgccgttgcgacaaaggccagcagcaacacagccaggccggccagccggtagcggcgccgaagcaacactcccaggcgttgcgtgttataggaacctgtttgcatcatcgcgactcatcctctgcgctggcaccgccagtgtttctgctccgggagcattcaatgttcagcctgtctcgcttcacgtcgcgcctgcggggctgggcacgccagctcaagcgtgacgtcatgacgctctggctctgcgcccgccacccggatacgccctggtggctgcgcgcgctgctggtctgcgtggtcgcctacgcgctcagcccgatcgacctgatcccggacttcatcccgctgctcggctatctcgacgacctgctgcttttgcccctcggcatctggctggccatacgcctgatgcctccggccatcctcagcgagtgccgcgcccaggcgctcgcctgggaggacacaccgcgcccggtaagccgcgccggcgccgtagcggtggtgctgatctgggtatcgggggccgctgccctggcctactggctgatgcagcgctgagcgacacggccgaccataaacaagcgaatgtgaaaaaaatgtcgcgagcgcagcggcggcgcaccgcccagcgtgtggatgcggtgggcttaagactgacttaaggctggcccccaacaatcgccccaggcttctaaccgaggttccccgatggaactgccctgggttgaacacactgacgtactggcgcgcatcggccgcgaatcgccgctgaccctgcaactggcgcaaccgggccagggggcgcggcgggcggcgctggaacatttcatcgccctgcgcttcgccgagagctaccaggcgcggatccgccacttcatgccctgcctgctgggcctgcatggcgacgacggtgcggtgcagggcgcggtcggcctgcgcagcgcccgccgccggccgctgtttctcgaacgctacctggacgagcccatcgagcaggccgtgagccggcgcagcggcatgccgatttcacgcggcgagatcgtcgaggtcggcaacctggccgcctttggcaatgcctcggcgcgcctgctgatcgtcgccctgaccgacctgctggtcgcccagggcttccgctgggtggtcttcaccggcacgccggcattgctcaacagcttccagcgcctggcactcgaccccatgccgctggggctggccgatccggcgcggatgggcgaggagcttgccgactggggcagctactacgccagccggccgcaggtcatggccggcgagatcctgcccggccatcagcgtctgctgcagctgggcatctatccgcggctgggctacgagccactattcaatgccggggaggtaccgcatgcagcctgcagctgaacgtttctgggcgaccctcgggcgccaagacggcgtcgccctgcgcgaaggtccgcagcaactgagctacgcgcagctgcgcgaagaggtggccaaccgcgccgaccaactcgtgcggttgggcgtgcggcgcgtcgccctggcgctggataacgggctggaatgggcactatgggaccttgcactgctgcgcgccgaattggtctgcgtgccactgccgggctttttctcgccggcgcagcatgcccatgtgttgcagcatgccggcattgattgtgtcatcggaacggcgaatccgctgatcgaggcgtccggcttcgaggcgacggcgcccggcgtgctgcaacgccccttgcaatcagtgacggctgtaccggccggcaccctgaaaatcacctacacctccggcaccaccggccagcccaagggcgtctgcctggatgccgaggcccagctggcggtcgccgacagcctgtggcaggccagcctgccctgcgcggtgcagcagcacctgtgtgtgctgccgttggcgacgctgctggaaaacattgcagggctctatgcgccgctgttggctggcgcctgcgtcgaactgcgtccgctggccgagatcggcttcagtggcagcgccggcttcgacttgccgcgctttctcgccacgctgaaccagagccgaccgcacagcctgatcctgctgccgcaactgctgctggccatggtcagtgccgccgaacaaggcgtgccactgcccgattcactgcggttcgtcgcggtcggcggtggcagggtcaccccgcagttgctcgagcgcgccgagcggctagggctgccggtgttcgaggggtacggcctgtccgaatgcgcctcggtggtctgcctcaacacgccggcagcgcgccgcaccggcacggtcggccagccgttggcacacgtcgaggtgcgcctggcggacgacggcgaggtactggtcaagggcccgcacatgctcggctacctcggcgagccggtgcagtcgggtgattggctggcgaccggcgatctcggccatttcgaggacggtttcctagtgctgcacgggcgcaagaaacaccagttcgtcaccgcctacggacgcaacgtcaaccccgaatgggtggaagccgagctggtccagcaggcgccgatagcccaggcctggctgcatggcgaggccctgccgcggaacatcgccgtgctggtgccgcgccgcgccgactgcagcgacgccgagctgcaagccgcggtggaccgggtcaacgccggcctgcccgattacgcccgcgcgcaccactggctgcgcgccaaggcgccgttcagcgccggcaacgacctggcgaccagtaacggccgtctacgtcgcgccgcgctgcaaacggcctacggcgccgatatcgacgcccttttgccttctgcctgatgaggttattcatggaattcttcgaccagttgcaacaccagacccgcaccgaacgcgactatctgctggcgtcgccgatcatccacgccgccctggccggcaccgccacccgcgagcagtacatcgccttcctcgcccaggcctaccatcacgtcaagcacaccgtgccgctgctgatggcctgcggcgcacggctgcctgaacgtctggaatggctgcgcgtggccatcgccgaatacatcgaggaagaaaccggccaccaggagtggatcctcaatgacatccgcgcctgcggcggcgatgccgaggcggtacgccacggccaaccggcactgcccaccgaactgatggtcgcctacgtctacgaccgcatcgcccggcacaacccggtgagcttcttcggcatggtcaatgttctggaaggcaccagcattgccctggcgacccaggcggctggcgtactccaggacaagctcgagctgccggccaaggcgttcagctatctgacctcccacggcagcctggacgtcgagcacatcgaattcttcaagaccctgatgaaccgtctcgacgaagacgacgacaaggcggccgtggtgcataccgcccgcgtggtctatcgcctgtatggcgacatcttccgcagcctgacggcctgaggaggcgagcatgcgactcgaacagtgccgcgccctgctcaccggcgccagcggcggaatcggccagcaaatggtcgagcggctctgcgccgatggagcccgtctcttgctcgtcggccgtggcagcctcgccttgcaagcgctggcgcgccgtcatccggaccaggtcagcctggtctgcgccgacctgacccagcccagtggccggctggccgtgctcgaggccgcgcggcgtttcggtggcatcaactgcgtgatcaacgcagccggagtcaaccagttcagcctgcttgaacagcaggacgaagacgccatcgcccggctgatcggtgtcaacgtgaccgccacgctgcaactcacccacctgctcctgccgctgctacgcgagcagccccgggcgctgctggtcaacctcggttcgaccttcggctcgatcggctatcccggcttcgccacctactgcgccagcaagttcgccttgcgcggcttttccgaagcgctgcgccgcgagctggccgatacccacatcaaggtgctctacgtcgcgccccgcgccacccgcacggcgatgaacagcgtcgaggtggtagccatgaacgatgcgctcaaggtgagcatggacgatccccaggcggtggccgcacagatcgtccaggcgatcatggccgagcgcgaggagctctacctgggctggccggagaaactgttcgtacgtctcaacagcctgttgccgcgcctggtcgatcaggccctgcgcaagcagttgccggtgatcaagcgcttcgcccgcgcagaccaaccgcgaccctctcatccctctggagatcacccatgaagcgcctgctcggcttgtgtaccgttctgttggctttggcctgccaaccctccttcgcgctcaccccggccggcgacgaagcgctgcatcagttgcagacgcgctgggccgagatcaactatcaattgccggccgcgcagcgcgaagccgccttcgccaaactcgccgcgacagccgacggcgccgtgaccagcgaaccgcaggcggccgagctgcgcatctggcatggcatcgtgctcagcacctgggccggcgccaagggcggcctgggcgcgctcggcctggtcaagcaggccaaggccgaattggaaaaggctatcgagctcgatccgcaagcactcgacggctccgcctataccagcctcgccacgctttattaccaggtgcccggctggccgatcggctttggtgacgacgacaaggcccaggcgctgttccagcaggcattgcacctgaacccgaatggcatcgaccccaactatttccacggcgatttcctgctgcgccagaagcgttacaacgaggcccgcgcggcgctgaaaaaggcgctcgccgcgcctgatcgccccgggcgtgaggtggccgacgccggtcgccgcgaagaagcccgcaacctgctcgtccaggtcgaggaaaagctggaataaccccccgcgacggggttgaatgaaccgcctcggccgccccaaaggacccacatgcgcattctgctggttgaagacgatcacgccctaggcgagggcatccgcacggcgctcaagcccgagggctacacggtcgactggctgcaggacggcgccagcgccctgcacgccctgacgcacgagagttttgacctggcaatcctcgacctgggattgcccaggctggatggcctggatctactcaagcgcctgcgcgccgccggcaacccggtgccggtgctggtgctgaccgcgcgcgacgccaccggcgaccgcatcgccgggctcgacgccggcgccgacgattacctggtcaaacccttcgacgtcgccgagctcaaggcccgcctgcgcgccttgctgcggcgcagcttcaaccgcccggagcccatcctcgagtaccgcgggatagcgctcgacccggtcaaccagcaggtcacctatcgtggcgtgccggtcagcctgccgcgcaaggaattcgtcctgctccacgaactcatcgcccagccgggccgcgtgctgacgcgcgaccggctgcagcaggtgctgtacggctgggacgaggaggtcgagagcaacgccctggaggtgcacatccaccacctgcgcaagaaattctttgccgaactgattcgcaccgtgcgcggcgtcggctatctggtcgacaaatgctgacgtactccatccgcaaccgcacgctggcactggtactcggcacgttgctggtatcgctgagcctgatctcctggcgcagctaccgcgatgcccgtcacgagaccgaagagctgttcgacgcgcagctggcacagagtgcgcgcctggttcagggcctggtgatgcgcgagatggatgcgccggcgcgccgggctttgcagcaggcgctggatgcggcggtgaacgcacagcgcggcaggggcgcaccgggacatgcctatgagaccaagctgggctttcaggtgtatgcggccgatggcagcgtcgtgctgcagtcggccggcgcgccgaaaggcgcactgcagcagctggccgaagccggcggatcaccggctcgctccttccgccagttgcccgcgggctttcatgatgtctcgctcgacggccacgactggcggctgtttctaatacaggatcacgaagacgacctgtgggtgctggtcagcgagcgcggcgatgtacgcggcgagctggtcggcaagatcgcccgccgtagcctgatgccggacctgatcggcctgcccctgctggccctgttgatatggctggcggtgggctggggcctgcggccgctggcagacatggcgcagttgctcaagcgccgcgacccggacaacctggcgccgttgttgctggcgccgttgccgcgcgagttggagccgatcgccgcgtcgttgaaccgcctgttacaacaggtcaatcagctggttgagcgggagaagcgcttcatcgccgacgccgcccacgagttgcgaaccccattggccgtgctgcgcatccatgcccagaacgcccagcaggccggcagccaggccgaccgtgacgaagcactccggcagttgctcgccggcgtcgaccgcaccacccgcgtagtgacgcaattgctgaccctcgcccggctcgaacccaacgcgcaacagctacgtctggcgcctctggatctacgcgccctggcgcgcgagacgctcgccgaactgaccccgctggcgctagcacgtcagcaggaactggcgctggaagccgatgatcaggccgatttcaatctggtcggcgacgccgcgagcctcgccaccctgctgcagaacctggtgagcaatgcgttgcaatacaccccgcacggcgggcgtatcgacgtccagctgcatgccacgccggaccacctgaccctggaggttgccgacagcggcccaggcatcgccagcgagctgcgtagccagttgttccagcgcttcgtacgcctgggcgatggccagggcgccgggcttggcctgtcgatcgttgcgcgcattgccgaacttcaccacgcccacgtcgaactgctcgactcttcactcggcggcttgcgcgtcgtcgtgcgcctgccccgccgctgaccaagatgaacggccgcgtcacggatcgagccatggcggcagttatccgatgccaggcaatgccgcgagatgaagcatcggcgcggtacatcgtcgcggcaagcagccgaataagcttggcttaagtttcagcgcttaaactagcggcattatccacacgcggagtacgtgaaatgaacgacaagcagctgccgactcgctacggtcggttgtctatctcgatgcactggttgatggtgctgctgatcgcggcggtctacgcaaccatcgaactgaagggcaacttccccaagggcagcgacacacgcgagctgctcaagcagtggcacttcatgctcggcttgtcggtcttcgcactggtctggctccgcctgctcgcacgctggctgcggccggcaccgctggccatcgccagcgttgcctgggagaaatggctggccaagctggcgcacctggcgctgtacgggctgatgatcggcctaccgctgctgggctggctgacgctgagcgcggcaggaaagccaatccccttcttcggcttggagctgcccgcactgctggcaccgaacaagggcctggccggcgacatcaaggaaatccacgaaaccgtggcggtactcggctactggctgatcggcctgcatgccgcagctgcactgttccaccactacatccgccgcgacgatgtgctgcggcgcatgctgccccagcggcatcaggcctgaactttgcgctgcccggtgcccgcgacgggctctggacagcggcggtcggctagctggccggcgggttggtcggcgggctggagcgtgcaggcgccggttcgaccgggtcgccgcgacggaacggttgcggctcgggttccggctcgacgtccgccacgggcgccggcccgtcgcccaggcgaaacggctgcggcgggccctgatccagccgacgcgcagggtgttcgggctcggcgacggcctcctcggccggtctttctttcagcaaccagagcgcggccgctgcgagcaacgctgcgcagactcggtaaatcagcgagaccagatcgaagccgatcaactcgccgccatccagccacaacgatccaagccgcccggcgaccaacgccagcatggtaatgaccagcatgaccaatgcggcgcgggcgcgctccggaacctgaatggcccacagcaagaacaacgccaggcccagctgcagccccccgtaatagacgcgcatgtggctgaccgaggcggactccatcagcaacatcccgttcagattggccatctcgtaagggcgcagccagtaggcgaggctgaagccgatcatgatcaccgcttgaacaatcagaacgaaacgggcaaaacgcatcgaaagctcccctgatagcggctgcgcagcacgacagacatctgaccgaagcggcgcgggttggttcgcgcagccgcctgctgccgagcgttgcaaaggtgatcgcgacaaggccgaggccgaacccgcgatgctacccgggcgccagggcagcaacgatgccgacgaaaccacctcgccgactgaatttgcacgtcatggggcgggtctgagcagagaccaacaacaagcggagggatacgggcatgcgctggaacaaggctcgtcgcagtgacaacgtggtggatgcccgcggacgcagtggtggtatcggtggcggacgcctgagcctggccggggtggccatcgtcgtggtgatcggtctgctctcgggccaggatccgatgcagatcctcggccagctggccaatcaaaccggctcggcacccactcagcaaagcaacacaccggcgcggggcgacgacccgcaagtggcattcgtccaggccattctgggtgacaccgaagacacctggcgcgcgttgttccagcagtccggcgcgcagtaccgcgacccgacgctggtgcttttccgcggcggggtcaattcggcgtgcggcttcgccaggtcggcggtcgggcccttctattgcccgggcgatcaacaggtgtacctcgacctgcagttcttcgatgaaatggcctcgcgcttctccgtcgccggggatttcgcccaggcctatgtcatcgcgcacgaggtcggtcatcacgtgcagacgctgtcaggcgtctcgcagcagatgcaggcggcacgccagcgtggcgccaagatggaaggcgacaacggcttgctggtacgtcaggaactgcaggccgattgtctggccggcgtctgggcgcaccatgcgcaacagcggcatgactggctcgaagaaggtgacctggaggaagcgctgaacgccgccaacgccatcggcgatgatcgtctgcaaaagcagagtcagggtcgcgtggtgccggatgcgttcacgcatggcacctcggcgcagcgggtgaaatggtttcgcaccggcttcgacagcggtgagccggcacgctgcgatacctttcaggcgcagcgcctctgatcgagctcagcgcactcaaccaacccagcgatacaccggcgcatccgccccgctgtcgaccttgacctgcgtgctgtggcgcaggcgcaccagcaagcgcttgcccgcctgagcgctgcccgtcagcgcttgcagctccgccaatagctgcggcccgtccattcgccctgcctcacgcaacagctgttgcgccccctgccaatggggatcggcggccgcctggtcgcttgcttgcgcctgcggctgagccgcctgaacagctggtagctggcgcgccagctgcgcccagtcgtgatcgtccatttcaatgctgaggtcgactggcaaatcaccgacatggccacgaattcgaatcatcatcgctctccagatcatctgagtcgcatgctcccatgcctcgagcaggctggccagccgccacaaacatttgttataacgtaacgaccaaacacaatggagttcgttatgcgccgtctgctgcttgccctgcccttcgctctgctgcccggtttcgttctggccgccgagcagcatgatcatgatcacgaccaccatgacagcctcggcgctcatgagcatggcgccgccgagctggatgctgcgctggatggctcgatgctggaaatcgaactccgtagcccggcgatgaacctggtgggcttcgaacacgcaccgagcagcgacgcggacaagcgcaagatcgccgacgcccgcgagcggctggagcaaccggacgctctgtttggtctgccagcagcggcaggctgcaagctggccgaaaccgagctggaaagtccgctgttcgaaggcgaagctcatgaccatggcgatgagcacgagcacgacggtgatcatgaaagccagcacagcgagatccacgctcattaccacttcgattgcgccacaccccaggcgattcaagcgctcgatctgcaggcgctgttcaaggcattcccgggcacgaagaagatccaggcacagctgatcggcccgaatggccagcgcggtgcacaactcgacgccgaccaaccgcgcgcgaccttctaacccgtagcctgccgccgcccagtccgacgcagtaaactcaccggctcgcctgaaacggatcatctcgatgaccgcaccgttgctcgatctccaccaactgggtttcgcctggcccggccaggcagaactgctcgacatccccagcttcaagctggaacgcaaccagagcctgtttctcaagggcccgtccggcagcggcaagaccaccctgctcggcctgatcggcggcgtgcataaagcgcagcgcgggacggttcgcctactcggtagcgacctcgcggcgctctcggcgggcgcgcgagatcgtttccgcgtcgaccacaccggctatatcttccagcagttcaacctgctgccctttctctcggtggccgagaatgtgggcctgccctgtcacttctccaaagcgcgcgccgaacgtgctcgtcagcggcatggcagcgtggcgcaggcgacagccagtctgctcgcacatctcggactacccagggacctgcatgagcgacgcgccgaagcattgtcgatcggccaacaacagcgcgtcgcggcggctcgcgccttgatcggtcagccggagctggtcatcgccgacgagcccacctcggcgctcgacgccgacagtcgggaagccttcctgcagctgcttttcgccgaatgccgggaggccggctcgagcctgttgttcgtcagtcacgaccagagtctggcgccgctgttcgaccgaagcctgtcattggcagacctcaaccgcgccgctcgcgccccggagatttaggccatgtacctgttgcgcctggccttggcgagcctgaacaaccgccgcttcaccgccctgctcaccgtcttcgccatcgccctctcggtatgcctgctattagccgtcgagcgggtgcgcaccgaagcccgcgccagtttcgccagtaccatcagcggcacggacctcatcgtcggcgcccgttccggctcggtgaacctgttgctgtattcggtgttccgcatcggcaacgccaccaacaacattcgctgggacagcttcgagcacttcgccgagcatcctcgggtcagttgggcgattcccatctcgctgggcgactctcatcgcggctatcgcgtgatgggcaccagcagtgcctatttcgagcattaccgttacggtcgcaaacaacccctgcaactggcgcaaggccggccatttgccgaggatccgttcgaggtggtgctgggtgccgaagtcgccgaggcactgaactacaagctggacgaccaattggtactggcgcacggtgtatccaccgtcagcctggtcaaacatgacgacaagccctttcgtgtagtcggcatcctcaagcgcaccggaacgccggtggaccgcacgttgcatatcaatctggccggcatggaagcgctgcatatcgactggcagaacggcatgccggcccgcggcgcggcgcacatcgacgccgagcatgcgcgtcagatggacctgcagcccaaacagatcaccgccttcatgctcggcctcaacagcaagatcgccaccttcgctctgcagcgcgagatcaaccagtatcgcggcgagccgctactggcgattctccccggcgttgccctgcaggagctgtggagcctgatgggcaccgcggaaaaggccctgttcgtggtatcgctgttcgtggtggtgaccgggctgatcggcatgctcacggcgatccttaccagcctcaacgagcggcgccgggaaatggcgattctgcgctcggtgggcgcccggccgtggcatatcgccagcctgatggtactcgaggcattcagcctggcgctggccggtgtcctgttcgggctgctgttgctgtacgtcgcgattgcagccgctcaaggtccactgcagagccactacggactcgatctaccgctggccctgcccagcacctatgagtggtcgttgctcggcggcatactgctcgccgggctgctgatgggtggtgtgccggcctggcgcgcctaccggcaatcgctggccgacggcctgtcgatcagactatgaggaattccatgtcttgcctgttgctcgccgccctgctcgcccttgcagcccccttcgccgccgccgatgtccgtgagctgcagtggtcggacctgattccagcggacgccccgccgcctccgccaccggtggcgatgcacgacctgtcgcagctggccgatgcgctggcggccgaagcgggccccgccgccgctcagcagtcgccagccgagccggtggtcaaggaactcgacggcgtacaggtcaagctgccgggctacatcgtgccactggaagtcggcgaggacggacgggtaaccgagtttctgctggtaccctatttcggcgcctgcatccacgtgccaccgccgccgtcgaatcagatcgtccacgccacaagcgagctgggggtaaaggtggacgagctgtatcagccgttctggatcgaaggcccattgaaagtcgaacacgccagcagcgagctggccgacgcgggctatcgcatggaagcgcagaagatctacctctacgagctcgaataacggcagccttgccacgcccgagcggaactgagcggaactgagaggcgtcatcgagcgattccacgcctatcgccagccccttcatgctggcaactgtttcgcagcgggatgctcgtcaccgaacgcagtccatgaacgagctgttagccacgcaaatggcagtacgccgattcgctctgcgtcgacctgcacccggcacccggcacccggcacccggcacccggaacgtataaacacgaaaccccgcgtcggtggcggggtttgcgtatacatcggctacgtgggttgttctaggtccgtgcactcatctctgaagcgttgggctacgacgccctagaccgttacgacaccgccattttggcatcaggttcagcgagcgctggcgacctgacgctgccgctcgaagctcagctcgccttccgcccactcgcgccaggagcggactttgcgtcgctcggcaccagcgcgctcggcctgcttcagcgcatcgaggccggcttgccagcgagcctgctccagctccagctgggcgacattcatccagagcttggcgcttccggactgaagggccagatcccgatagatccgcgccgcttccgagcgctcgcgtgcctgccaccagagcatgcccaagcgctcgcgccgcgtggtatcgctcggtagaaggcgcgactccagcatgccttgcagcaactttgcgccttgccatggctgaccggcggcacctgccagcagcaccaggttgtccagctcagcttcgctgaaacgcagccctttggtatgggccgcacgcagggtcgcgagcgccttgtcctcgtcaccggccatctgctgcaagctcgccaactggcgccagcttttgacctgatccggatgccgcgcaagcagtcggctttgccagcgttcggcggtctcgtagcgcttcaactcggcgttcccggccaccagaaactgcaaccaggtatcggccgcgttgggattggcctggacatagcgctcagccaacggcagcgccttgctgtgctgcccgagcccctggtaggcctggaccagcatctgcagcacttcttcgttcgcctgggcaggcgaacccaacaggctgaccaccttggcgtagcggcgctcgatcagattgagtttcgccaggttgagccgctcggtcggcagcatcgcctcgtccagcttgccgctggcgattgccttgtcgagcaactcgagcgcttgccgattattgccttccgcccaggccagataggcctcgctgcgccatagcaacgcctgctccgcactgcctggcttggcctcagcctgcttgagagcattgcgcgcagcggcatagtcacccttttcctgcgcactctgggcacgctccagcgccttgaaaaccgatggatcgacactctgggcggcttggaccgatacagcgaacaacaacgagatcagtaacagcgaacggggcatgtcagcgttctccttgcaggcggaaatgcagggttttgacggcttcgcgcgataccgcggcgccgttttcggtacgcggcgcaaatcgccagcgagcggcggcacggcgtgcctcgcggtcgaagacgttgggtggtgacgcgtccagcacccggatgttctctaccttgcccgctgccgtaatggtgaaggcgagcttgatgtggccctcgatgccacgctgacgtgcccgatagggatactcgggccggacgtcgttgagcggcatgacttcctgctcagggcccgattggccagccgtctcggcggccgaaggggccgctggcgcaggaggtgcggccggagcggatgcggccgtcaatccggcaaggctgggggccggcgcgctggcaaccgagacgccggtatcgatgttcggtagcggcagatcgagcttgggcagattggcactcgggctggccatgctcggtgtcggcggcgtgggcgtcggcggtgtcttcggctgcggcggttgcggtgcctgctgccgtgaacgtgtcgcggcgctttcgtcgcggttgtccatgcgcacgaaattggcgatggccactggatcgtccgccacctcgttacgcggcgggttgaccatgctcaacatcagcgcgaacaacagcaacgccaccacgcaggcggcgatgaaggacaacccgacgcgggtcagcccaccagccatcacggcgctcccgacgtagcggcaagggccacatcctgaaccccggccagacgcgcctgatccatgacctgcaccaccagcccggtccgggcatcctgatcggcctgcaccaccacggcgccttcgggctggtcgacgcgcatgcgttcgacgtgcgcacgcacgctgcgcacgtctacggcctgcttgtctatccagacctggccgtcggcagtcaccgcgatgaggatgttgcccttgtcctgggcgctggcggtatcagcctgaggccgctgaacctcgacgccggactccttgataaaggagctggtgacgatgaagaagatcagcatgatgaagaccacatcgagcatcggtgtcaggtcgatgccggtgtcttcttcctgctggtaatggtggcgacgcatacgcatccggtaatcctcaatcgtgacgcagctggtcggccagccggtcgagagcctggcgcgaaatacgttcgagacgtgccaggctgaacagtccagtgatggccagcaccatgccggccatggtcggcagggtcgcctgccagacgcccgcagccatgccgcgagggttgccggtgccgttgagcgccagcacatcgaataccgcgatcatgccgctgacggtaccgagcaatcccagtagcgggtacatggccaccagggtcttgctcatccgcaaggggccggcgagctgctgctgggcctgggccagccaggcgctgcgcacggcgcgctgccaattgccggactcgttacccagttgcgcccacgcctggcgtcggctttccacccagcgtgggaatacccggcgcatgaaccacagtcgctcgaacaccagcgtccaatagagcacgcacaaggctgccagcgcccacatcaccgcgccgcccgccgccatgaagtcgagcagcgagtaagcgctgtcgatcagacgcagccattggccatgcagatcagtcacggcgcggagtccccgacaggtgcagcgcaatcaacccggcgctctgctgttcgagcagttggatcagcgccttgctgcggctggccaaaaggctgtgcaggaacagcagcggaatcgccacgaccaggccgagaaccgtggtcaccagcgcctgggagataccgtcggccatcaaccgtgaatcgccaccgccactctgggtgatggcctggaaggtcacgatcatgccggtcaccgtgcccagcaggccgagcaagggtgcgacagcgctgagcagcttgagcagcggctggccgcgctcgagaggcggcgtctcctgcagaatggcctcgtcgagcttgagttccagggtctcgaggtccgaaagctgtggcttcggtcccagcacgccgatgatgcggcccagcgggttgtcatcgcgcggctggctaagctcacgcgtctgccggttcaccgcgcgcccgacacgggccaggtaaaccatgcgccagatggcaaggcataggccgatggcacccagcaccagaatcacccagccgaccagcccgccttgctgaacacggtcccacagctggggctgacgctgcagttgcgccagcagcgaaccgcgagtcgggtcgatcggcagggttgccaaggcctcgttgctgctcagatagtcatccaccattcccatgccggcaggttggcgaccaggtgtcagcagctcacgagcatcgctgtcgtagcgcaggaaattgtcttccgtgaacgccgagaagttgccgatacgcagtaccgattgctccctgcgctggccgtcggcactcactaccggcaatttgacgcgctcgacctgtccgctggccgtgaggtcttcgagcagtgtcatccagaagccgtccagatcttcggccgatggcagcgtccggctttcggctagcgccttgagccgcttgagccgctccgggtattgcgcattgagcaaactgtcctgccactgcccggcgatatcaccggcactctggcgaaccacgccgaagagttcgccaagatggccgacccgctgcgccagcaacttttcctgctcggccagctcggcctcctggcgatcgaactcggctttcaaacgctcggcttcggctttctgtttttcaagtgtggctttcgcctgtgccagcaattgcgcttgctcgctgcggttctgaatgaaagcctgctcacgcgcctgcatggcgtcgacttccgcggcgcgctcgctgcgaatgcgctgcagcagctgttccggggtcaatggctcggcggcctggaccaacgcaggcagtagcccaatgagcaacagggtcaacaaacgattcattgcgcagcctccgtggccaaggtcttcactggcagctccagccaggtcggcgcctgttgctgacgcgcgatggcgatggctttgccgatcggccggcgggcgctaccgtccaggacttcccaggcgtgcgtcttcgggttccaccagccgctctcgtgggcatccagggtctggtaatagagcatggtgcgacccaggcgcaggaactcgacgctgcgactgccgccttcgaccggcatctcgccgcgccaggcctccagcgttctgccgtaatcactctcgatctgataggcctcgagaatccgccggtacttctcggccaggctgacatccgcccgggcctgcatgtcctgcaggctggccagacgatccgcacgctcatcggcgaggaacggcaggtcggccgcaatgaattctccgagcacctcgaccatccgccccatctgcggcgcaacggcctgctgggtgcgttcgatgctgtccagttgccgctggaagccatcgagctccttgcgctgcccggcggtaagttcggtcagttgctcgttataggctttcaacgcttctgcctgctgcacggcactgcggtagtcgttgagcgtctgccggctggcatcgtcgagctgctcgatacgcgcttgcgaggctttcgcctcagccgccagtcgctggctttcgtccagcgcggcgtccagcggagctgcgtggagctgcacgcagcatggcaacacgacggccgccaataggcggggaataagggcttgcattgatggatccttgcagacgaaggtcaaactcgaaagagaaacattatcatctagatccacaaaggaaggcaacccgggcaatacgtcgcagcccaggcagtgcggggcgtttcgttgagctggatcaaaatcgacgcaacgccgggccctaacatggcgccaaccgcaacacacctgtctcgatggagttccattatgcgcaagaccctgtttaccgcttccgtgctggccgtggccctcgccgctcccttcgcccaggcccatcaggcgggtgatgtcatcgttcgcgctggtgcgattacggttgatccgcacgaggacagtggcaacgtgaaggtaggcggcacctcggttcccggcactggcgcgacacttgatagcgatactcagctcggcctgaacttcgcctatatggtgaccgacaacctgggcgtcgagctgctggcagctaccccgttcacccataacgtcggcacgaagggcctgggcgggctgaagcttggcgagctcaagcatctgccgccaaccctgagcgtcgtctactacccgttggaaaagagttcagccttccagccttatgtcggcgcgggcatcaactacacctggttctttgacgacaagctcagcaacgaggcggagcaggcaggcttccggggcctggacatgaaggattcctggggtctcgcggcacaggtcggcatggactatatgctcactgagaacgtcatggtcaacgcccaggttcgctatattgatatcgacacgaccggtacgacctacgctggcgataccaaggtgaaggtcgacgtcgacgtcgatcccttcgtctacatggtcggtctcggctacaagttctgatcagcagcactgccgcatcgcagacgaacaaaaggcgccaatggcgccttttgcatttgcggttcttgctacaggcccagtaacttcgccagcccgtcgcgcataccggtcggcggatcaggcagacgataacgctgcaacagccgcccattgctggcacgcgagtggcgaatatcacccggccgtggggcctggtgactcacctcaggcaatccgccaagcacttcgccaacagcctcgagcaactggttcagcgaagtcgcgcggttgaggccgacattgacggcgccctcctgcacctctggcgcttccagcgcctggaccaacacctcgaccaggtcgcccacgtagaggaaatcgcgagtctgcccgccatcgccgaaaacggtgatcggcaggcccttgcacgcgcgctcggtgaaaatgctgatgaccccggagtacggcgaagacgggtcctgccgaggcccgaatatgttgaagaaccgaaagatcaccggttccagcccatgctggcgccggtagaagtccaggtaatgttcactggccagcttgtccgccgcataaggcgtcagcggtgccttgggcgtgtcctcgtcgatcggctggccttccccgttattgccgtaaaccgcggcgcttgaagcaaacactacccgacgcaaaccttcggcgcgcatcgcctcgcaaaggttgagcgtgccaatcagattgctctgatgcgtgccgatcgggtcatcgaccgatgcctgcaccgaggccacggccgccagatgcaccacggcccgacaaccctgaacggcccgccgcaccatcgtcgcatccgccacgttgccttcgagcacttcgacgcaatcggcacccggcaaattgctgcgcttgccgctggaaaagttgtcgagcacccgcaccgagtagccccgggcgactagcgcatcgaccagattcgagccgatgaagcccgcgcctccggtgatcaggatgggtgagtcagccatgacggtaatagcgctccagcaggctcggcaacccggcacgccaggcgcgcggtttgatgccgaaggtattgaagattttcttgcaggccagcacgccatgctggggctcgtcagccgcatccgaacaggccgcatgcgcaacgggcgtcaggcgctcaaccttcaacaggcgatactgagctgcttcggccagcagtgcttgccccaccaccagcggggtcgaggcctcatggccaccatagtggtaggtaccccacagcggcgcctggcaatccagttgcttgagcacggccagaacgacccgcgctgcgtcttcgaccggcgtagggttgccgcgccggtcatcggcgagacacagctcgtcaccgtgttcgaggcgctgcagaaatcggcccagcaggccttctgcgctgtcgtccagcagccaaccgaaacgcagcaggacatgacgcggacagagcgcacgaacgctctgctcgaatcgccagagcgcgcggctgcgggcatcgagcggcgccacgtcgtccttctcgctgtaagcggtagtacgcgcaccgtcgaatacgcggtagctcgacggctgcatcaagatcagctggtgatgctggcacaactcggccaggcgctcgaccgcgcgctcctgctgggccaacacagcctcgtcgacctgcccaccttggaaccagtcgaaataataggcgaggttgatgaccacatccggacggctttcgtcgagcaagtcggtcaggctgggcgcgtcccagccttgatcgggcgggcgcggcgcaatgaagccgatgtcttcttcggctccgaggcggatcagcgcctgacccagggcattgccgccgcccaacagcatcaggcgcattcgcattgagtgaactctagaatggaatgtcgtcgtcgaagctgtcgtagtccggagccggctgctgtgccggctgcggctgggactgcgggcgagactgttgcggttcacgctgagggcgcggctgcgattgacgcggcgcgtcatccgagctgccgccacggccgcccagcaactgcatggtgccgcccatgtccacgaccacctcggtggtgtagcgcttgacgccgtctttttcccattcgcgggtctgcaagcggccttcgatgtagcactgcgagcccttgcgcagatactcgccggcgatctctgcgaccttgccgaacagcacgacgcggtgccactcggtgcgctcctgctgctgtccggtctgcttgtccttccagctgtcggtagtggccagcgtgatgttggtcaccgcattgccattgggcatgtagcgggtttccgggtcgccgccgacattgccgatcaagatgactttattcacccctctggccatgggtaactccttcgtaaaagcatgaataggtggctctctggagagaatcccccgttcggggaaaagccaatgaccgtcaatcttaccctaccgcccctgaccggccaaccggcgcgacttcacacagtggagcggtagagggtattgccggcccgataccgggactcaggcgaccagacgatcgagtgcggcgcgatcgagcacctgcatgtcgaccttcacataggccgccgattcttcggcgatcaccacggcatccgatacgcccggaaccgccagcatgcactctaccagcgtcggattgcgtgcggcgtcggccgacaacggcagcctcaggccggtgacgtaaggcggctcgcgcatgctccaggtcaccaacagccacaggccgcacagggcagcacaacctgcgaacaccaaccccaacccacctacctggtagaaccagccaccgatcacaccgcccaggccggagccgaggaactggcaggtcgaatagattcccatcgccgtgcctttgccacccgcaggtgcaaccttgctgatcaacgacggcagggacgcttccagcagattgaacgctacgaagaaaacgatcatgccgccaaccagcgaccagagccggttgccgaacagccagaagaacagttcggccactatcaacacgccgacggcaccgagcaccacgcgcttcatctggcgcttcttctcgccgtagatgatgaaaggcaccatgccgaagaagccgacgaccagagccgtcaggtaaacccaccagtgctcgtccttcggcagtccggcttcgttgaccagcgctagcggcaacgcgacgaaactcgccatcaggatcgcgtgcagcacgaagatgctgaaatcgagccgcagcagatcgggatgccgcaccgtcacgcccagcgcctgcctcgccacgccggattcgcgatggcgcaggtgccggtgcgcacggggcaacgtcgcaatgatcgccatgcccaccaacgccataccggccgtggtccagaacagtcccgacaacccgtacgcacgcgtcagcagcggcccgaccaccatcgccacggcgaacgaaacgccgatgctcatgccgatcatggccatggccttggtgcgatgttgctcgcgggtgaggtccgaaagcagggccatcacggcggccgagatcgcaccgccgccttgcaaaacccgaccggcgatcacgccccagatcgagtcggccgaggccgccagagccgcgccggcagcgaagatcagcaagccgaagtagatcaccggcagccgaccgatgcgatcggaaagcatcccgaacggaatttgtagcacggcctgggtcaaaccataggcaccgatagcgagaccaatcagtgccggcgtcgcccctttcagctcaaggccgtaggtcgccagcaccggcagtaccatgaacataccgagcatgcgaaacgcgaaaaccagggccagcccggaggctgcacgggtttcggcggcactcatgcgctcgctgtagggatcatgcatgtggggtctcgcttgaatgaaccggcggcgattctagcagtcatcccctgctcggcacaggctggctactttgccgcagtgacgcccctggccgtataatttcgggtttccgcccgccacgcgaggctgctttggacaagattctgattcgtggagctcgtacccacaacctgaagaacatcgacctcaccctgccgcgcgacaagctgatcgtgatcaccggcctgtcgggctcgggcaaatcctcactggccttcgacacgctctacgccgaaggccaacgacgctacgtcgagtctctgtctgcctatgcgcgacagttcctgtcgatgatggaaaagcccgacgtcgacaccatcgagggcctctcaccggccatttccatcgagcagaagtcgacgtcgcataacccccgctcgacagtcggcaccattaccgaaatctacgattacctgcgcctgctttatgcacgtgtcggcacgccacgctgcccggatcacgacgcgccgctcgaagcccagacggtcagccagatggtcgatcaggtgctggcactgccggaaggccggaagctgatgctgttggcgccggtcattcgcgagcgcaagggtgagcacctggcggtgttcgacgaactgcgcgcccagggcttcgtccgcgcacgggtcaacgggcggctttacgagctcgatgagctgccgaagctggacaagcagaaaaagcactcgatcgatgtggtggtggatcgcttcaaggtgcgcggcgacctgcaacagcgtctggccgagtccttcgagacggcgctcaagctcgccgacgggatcgccttggtcgcctcgatggaagaggacgacgacagcgaggaaatgatcttctccgcccgcttcgcctgcccgatctgtggacactcgatcagcgagctcgaacccaagctgttttcgttcaacaaccctgcgggcgcctgtccgacctgcgacggtctgggggtcaaacagtttttcgatgccaagcgcctggtcaatggcgaactgacgctcgccgaaggtgcgatccgtggctgggatcggcgcaacgtctattacttccagatgctcggttcgctcgcttcgcattacggcttcagcctggatgagccattcgatgcgctgccgtctgaacagcagaaggtcgtgctgcgtggcagcggcaaggaaaacgtggacttccgctacctgaacgaccgcggcgatatcgtcaaacgctcgcaccccttcgagggcatcattcccaatctcgagcgccgctaccgcgaaaccgagtccaactcggtgcgcgaagagctggccaagtacctgagcactcaaccctgccccgaatgccgcggcacccgtctacgccgcgaagcccgtcatgtctgggtcggcgacaagaccctgccggcggtcaccggcctacccatcggcgacgccaccgactacttcggcgcactgacgctcaccggtcgtcggggcgagatcgccgacaagattctcaaggaaatctgcgaacgcctgcagttcctggtcaatgtcggcctcgactacctgaccctggaccgcagcgccgacaccctgtccggaggcgaggcgcagcgcatccgcctcgccagccagatcggcgctggcctggtcggcgtcatgtacatcctcgacgaaccctcgattggcctccatcagcgcgacaacgaacgcctgctcggcaccctgcgccacctgcgcgatatcggcaatacggtgatcgttgtcgagcacgacgaagatgcgattcgcctggccgactacgtcgtcgatatcggccccggcgccggtgtacacggcggccagatcgtcgccgaaggtacgccggacgaggtcatgaacaaccctgcctccctgaccggtggctatctttccggccgggtgaagatcctttaccccgaacagcgcacgccgcgtgacgcaaccaagctgctgaagctcaagggcgcacgcggcaacaacctgcgtaacgtcgatctggaaatccccgtcggactgctgacctgtatcaccggcgtctcagggtcgggcaagtcgacgctgatcaacaacacgctgttcccgatcaccgccaccgcgctgaacggtgccacgaccctggaagtggcagcccacgactcgttcgacggcctgcagcatctggacaaggtggtcgacatcgaccagagcccgatcggtcgcacgccacggtccaatccggccacctacaccggtctgttcacgccgatccgcgaactgtttgccggcgtgccggaagcacgctcgcgcggttatggtcccggacgcttttctttcaacgtcaaaggcggacgctgcgaggcctgccagggcgacggcgtgatcaaggtggagatgcactttctgccggacatctacgtaccgtgcgacgtctgcaagggcaagcgctacaaccgcgaaacgcttgaggtgaaatacaagggcaagagcatcaccgaagtgctggacatgacaatcgaggaagcgcgcgagttcttcgatcctgttccggccgtggcgcgcaagctgcagacgctgatggatgtcggactgtcctacatcaagctcgggcagagcgcgaccacgctctccggcggcgaagcccaacgggtgaaactgtctcgggaactgtccaagcgtgataccggcaagaccttgtatatcctcgacgagccaaccaccggcttgcacttcgccgatattcagcaactgctcgacgtgctgcaccggttgcgtgatcacggaaacaccgtggtcgtcatcgagcacaacctggacgtgatcaagaccgcggactggatcgtcgatctcggcccggaaggcggctctaagggcgggcagatcatcgcagcaggcacgcctgaacaggtggcggccgcggcgcagtcgcacaccggtcacttcctcaaacccttgctggagcgcgacaaacaatagctgcaaacatgaaaaagccgggcgcagagcccggctttttgcctccctcgatcaggcgatttcgctgggatccatccccaagccttttgcgacacccgcaccgtaggcaggatcagccttgaagaagtagtcgagctggcgaagctgaacatcccgcgtgactggcttcatcgccgtaacgatattgccgacgagcagcgcttgctgctccctgctcatcaaacggaacagcgcccctgcttggctgaaataatcatcgtcactgcggtgatcatgacggtccgccgcacccttcaacgccagggcgggctcagcctgccaggacgcctgcttgggtgcgtcgacatagctgttcggctcgtagttcggggcagctccaccgttgccatcgaaacgcatcgccccatcgcgctggtagttctggtacggacagcgcggcgcattcaccggcagctgttgatggttggtgccgatccggtaacgctgcgcatcagcgtaagcgaacacgcgtccctgcagcatgcgatccggcgacagcccaacccccggtaccacgttgctaggcgcgaatgcggcctgctccacctcggcaaaatagttgagcgggttacgatcgagctccagcacgccgacttcgatcagtggaaactccctctgcgaccacgtcttggtcacgtcgaacggattctccgcacgggacgccgcttgctcctcgctcatgacctgaatgcacatccgccatttgggaaactcgccccgctcaatcgcgctgaacaggtcacgctgtgcataatcgggatcgctgccggccaaccgaacagcctcctcaggcgccaggttttggatgccctgcatactcttgaaatggaacttcacccagctgcgtacaccttcaccgttgatcaggctaaaggtatgactgccgaagccatgcatatggcgatatccgtccggaatgccgcgatcggaaaacagcacggtgatctgatgcaatgcctccggagaatgcgaccagaaatcccacatcatctgcgggctcttgagattggtccaagggtcacgcttctgcgtatggataaaatctggaaatttgagcggatcgcggataaagaacactggcgtgttattgccaacgacatcccagttcccctcctcggtgtagaacttcaccgcgaagccacggggatcacgttcggtatcggcagaaccgcgttcgccacccacagtcgaaaagcgcaggaatagtggggttttcttgccgacggcttcaaacatcttggccttgctatagcgtgagatgtcgccggtaacggtcagggtgccgtaggcgccagatcctttagcatgcacgcggcgctccggtattacctcgcggttgaaatgcgcgagcttctcaaccagatgaaaatcgtccagtagaagcggcccgcgaggcccggccgaacgagagttctgattatccgcaaccggggcgccagaagctgtagtgagaatttgcgtgtcgctcatgctgtcgctctcctgagaagtgccagatggttggctggctaagattctcggcgagcgttgatcagcaatctaatttattaagcgaagcgcatcgatagcctcagcctaaacttgagcgcaggcgaaaaaaaaccgggcaaacgcccggttttttatcaagcaagcaatgcttactcggcagcttccacctcaccagtgaccggacggtcaaccagttcgacataagccataggagcattgtccccagcgcggaaaccgcacttgagaatgcgcaggtaaccaccctgacgagtggcataacgcggtcccagatcattgaacagcttgccaacgatcgccttagagcgggtgcgatcgaaagccagacgacggttagcgacgctgtcttccttggccagggtgatcagcggctcggcaacgcgacgcagttctttggccttgggcagggttgtcttgatcagttcgtgctcgaacagcgacaccgccatgttctgaaacatggccttgcggtgagcgcttgtgcggctgagatgacggccacttttacgatgacgcatgattgaaattccttaccaaacgatcagttcggtgactatggtcgatcaggccgtagccttatcgtccttcttgagactggccggcggccaattgtcgaggcgcatgccgagggacagaccacgagaagccagaacgtctttgatttcggtcagagacttcttgcccaggttcggcgttttcaacagctcgacttcggtgcgctggatcagatcaccgatgtagtagatgttctctgccttgaggcagttggccgaacgtacggtcagttccaagtcgtcaactggacgcaacaggatcggatcgatctcgtcttcctgctcgactacgaccggctcgctgtcacccttgaggtcgacgaacgcggccagctgctgctgcagaatggtcgcggcacgacggatcgcctcttcgggatccagggttccgttggtttccaggtcgatgaccagcttgtccaagttggtacgctgctcaacacgagcattttcgacaacataagcgacgcgacgaaccgggctgaaagtagcgtcgagctgaagacggccgatgctgcggctttcatcttcatcactctgacgagcgtcagccggctcgtagccacggccgcgagcgaccttcagcttcatgttgatcgagccattagccgccagattggcgatcaggtgatcgccattgacgatttcgacatcgtgatccagctggatatcggcagcggtaacagcgcccgcgcccttcttcaccaggctcaaggtcacttcatcacggccgtgcagcttgatggcgatacctttgaggttcagcaggatttcgatgacatcttcctgcacgccctcgatagcgctgtactcgtggagcacaccgtcgatctcagcctcgaccacagcgcagccgggcatggaggacaacagaatacgacgcagcgcgttgcccagggtatgaccgaaaccacgctcgagcggctcgagggtgatcttggcacgggtcggactgaccacctgcacatcgatatggcggggggtcaggaactcatttaccgaaatctgcatggatacacctattttctagcccttacttggagtagagctcgacaatcaggttttcgttgatgtcggcggacagatcactgcgagccggaacactcttgaaaacaccggatttcttgtcggcatctacttcgacccattcaacgcgaccgcgctgtgcgcacagttccagggcttgggcgatacgcagctggttacggcatttttcacgaacggcaacgacatcaccggccttcacctggaaggacggaacgttcacggtcttgccattaacactgattgccttatgggaaaccagctgacgcgactcggcacgagtagagccgaagcccatgcggtaaaccacgttatccagacggcactccagcagttgcagcaggttctcgccggtagcgcctttacggctggcggcttccttgtagtaaccgctgaactgacgctcgagcacgccgtagatacgacgaactttctgcttttcgcgcagttgagtaccgtaatcggacaggcgtccacgacgctggccatgtacacccggaggggtttcgatgttgcacttggattcgagcgcgcgtacaccactcttcagaaagagatcggtgccttcacgacgagacagtttgcacttgggaccaatataacgagccatttctcactgtctcctgattacacgcggcgcttcttcggcggacggcacccgttgtgcgggattggcgtcacgtcggtgatgctggcgattttataaccacagccgttcaaagcacgaacagcagattcacgacccggacctggacccttgacgttgacgtcgaggttcttcagaccgtattccagcgccgcctgaccagcgcgctcagccgctacctgggcagcgaacggagtgctcttacgcgagccgcggaagccggaaccaccagaagtagcccaggacaacgcgttgccctgacggtcggtgatggtgatgatggtgttgttgaaagacgcatggatatgggcgatgccatcaaccaccgtctttttgattttcttacgaggacgagcagcaggttttgccatgattagattcctgtcgatgcgctaacgcgattacttgcggatcggcttacgcggacccttacgggtgcgagcgttggtcttggtgcgctgaccgcgtaccggcagaccacgacgatgacgcaggccgcggtagcaacccaggtccatcaagcgcttgatcttcatgttgacttcgcgacgcaggtcaccttcaacgatgaacttggccacttcgccacgcagcagttcgacctgctcgtcggaaagatccttgatttttgctgccgggtttacaccggtagctgcacagatggtctgtgcgcgagtgcgaccaacaccatagatgtaggtcagcgagataacagtgtgcttgttatccggaatgtttacgcctgcaatacgggccattcagtgaaactccaattgacagctacccaacgccccggaagccaagaaaagggcgcgagatactaacgctgtaataacaaataatcaacccggcagcgcactagctgccgggcccgagccttagcccaacaatcagccttggcgctgtttgtgacgcggttctgcgctgcagatcacccggataacgccttcgcgacggacgattttgcagttgcggcacagttttttgaccgatgcacgaactttcatgaccaactcctggaaccttacgggctgactagcggagcattccgctgccataacccttcaggttggcttttttcatcagggaatcgtactggtgagacatgaggtgcgattgcacttgggacataaagtccatgacaaccacaaccacgatcagcaacgacgtcccgccaaggtagaacggcacgtttgcagccaccacaagaaactgcggcagcaagcaaacagccgtcatgtacagggcgccgaacatggtcaaccgagtcagcacaccatcgatatagcgcgccgactgctcaccaggccgaatccccgggataaacgcaccggacttcttcaggttttccgcaacatccttcggattgaacatcaatgccgtatagaagaagcagaagaagatgataccggcactgaacaacaagatattcagcggctggccaggcgcaatggactgggagatgtcagccaaccagctcatattctcggactgcccaaaccactgccccagcgacgcgggaaacagcagaatactgctagcaaaaatagcgggaataaccccagccatgtttactttcagcggcaggtggctcgtctgcgcagcgaagaccttgcggccctgctggcgcttcgcgtaatgaacggcgatccgccgctgaccacgctcgatgaacaccacgaacccgataatagcgacagccagcaggcctacagccaacagcgcgatgatgttgacatcgccctggcgtgcagactcgaaggactgccccagcgcacgcggaatccccgccacgatgccggcgaagatcaacatggagataccgttaccgacacctcgctcggtgatctgctcgcccaaccacatcatgaacatcgcacccgccacgaaagtggtgaccgcgacgaagtagaagccgaagtccgcactgaacgcgacgccctggccagcgagaccgaccgacatgccaatcgcctgcacgagagccaggacgagcgcgccgtagcgcgtgtactggctgatcttacggcgcccggcctcgccttccttcttcaactgctccagctgcgggctgactgcggtcatgagctgcatgatgatcgatgccgaaatgtacggcatgatccccaacgcgaaaatactcatgcgctccagcgcaccaccagagaacatgttgaacaggctaaggatggtcccttcgttctgacggaacagctcggccaacctgtcgggattgatacccggcaccgggatgtgcgcaccaacacgatagacgatgatcgccatcagcagaaaacgcagacgagcccagagttcagacagcccgccattactcagcgcggagagagcaccttgcttagccatttattcctcgaacttgccgccagctgcttcgatagccgcacgcgcacccttggtggcggcgatacccttcaaggtgaccgcacgcccaacctcgccggacagcatgattttcacacgctgcacgttttggttgatgacgttggcatccttaaggctctgcacggttacgacatcgccctggaccttggccagttcggaagtacgaacctcagcacgatccatcgccttcagggagacgaagccgaacttcggcagacgacgatgcaatggctgttggccgccttcgaaaccgggcgcgatcttgccgccggagcgggaagtctgacccttgtgaccacgaccaccggtcttgccgaggccgctaccgataccacggcccggacgcagcttttcgcgacgggcgcctggcgcagaacgcaaatcgttcagttgcatggcttagccctccacacggagcatgtaataagccttgttgatcatgccgcgattttcaggagtgtcctgaacttccacggtgtgaccaatgcgacgcaggccgagacccttgacgcacagcttgtgattggggatacgaccgctgacgcttttgatcagcgtgaccttgacggtgttagccatgatcaggaaatctcctcaacgctcttgccacgcttcgcagcgatcgactcaggcgactgcatggctttcaagcccttgaaggtggcatgaaccacgttcaccgggttggtagagccatagcacttggccaggacgttctgcacgccggcgacttccagaatggcgcgcatggcaccaccagcgattacaccggtaccttcggaagcaggctgcatgtacaccttggaagcgccatgcgcagccttggtggcgtattgcagcgtggtgccgttcagatcgacctggatcatattgcggcgagccgcttccatggccttctgaatagcggccggaacttcgcgggacttgccacgaccgaaaccgacacgacccttaccatcacccaccacggtcaacgcggtgaaggtgaagatacggccgccttttactgttttggcgacgcggttaacttgaaccagcttctcaatgtagccttcgtcgcgcttttgctcgttatatgccataacttagaactccagcccgccttcacgagcagcatcagccagtgccttgacacgaccgtggtacttgaagccagaacggtcgaacgccacctgggtgacacctgcggccttagcacgctcagcgaccagctgaccaactttcttggcagcgtcgacgttgccggtggctccgtcgcgcagttctttgtcgagagtcgaggcactggccaggaccttgccgccgtcggccgaaaggacctgggcgtagatgtgctgcgaagagcggtacacacaaaggcgtacggcttccagctcgcgcatcttcaggcgtgccttgcgagcgcgacgcagacgagtaactttctttacgctcatttgctatgccctacttcttcttagcttctttacgacggaccacttcgtccgagtaacgcacgcctttgcctttgtaaggctcaggacgacggaaatcacggatttcagcagccacctgaccgaccagttgcttatcgacacccttgatcaggatatcggtctggctgggggtctcagcggtaacgccttgcggcagttcatattccaccggatgcgagaagccgagagccagggacagcacttgacctttggcttgcgccttgtaaccaacaccaaccagctggagcttgcgctcgaagccttggctgacgccgattaccatgttgttaaccagcgcacgggtggtaccggccatggcacggttctgctgatcgccattacgcgcagcaaaacgcagctcaccagcctcgtgaataacttccacggacgagtgcacattcagttcgagagcacccttggcacccttcaccgaaagccgctgaccagacatgttgaattcaacaccggcgggcagcttgacggggttcttagcaacgcgagacatgcttatccccccttagaacactgtgcagagcacttcgccgccgacgccagcagcgcgagcagcccgatcagtcatcacacctttgttggtggacacgatcgaaacacccagaccgccgcgaaccttcggcaactgatcaacggatttgtactggcgaaggccaggacggcttacgcgcttgagctcctcgatgaccggacggccttcgaagtacttaagctcgatggacagctgcggcttggcgtcgctgctgacgttgtatcctgcgatatagccttcaccttgaagaacgttggctacagccaccttcagagtggaagacggcatgcttacgacggacttttcggccatctgggcattacggatacgagttagcatgtccgctaacgggtcctgcatactcatgggctcttggctcctaatactaaaaaataagcccgcgagggctcgtgtcgccgacaagaagagcaaacaccaaagggcgtggctcgggcgagccggacattctagagatagtccagaaacgaatcaagccccgtaaggggcttgattggaaaacagcaagcccgacgcgaacgccgggccaccatcttaccagctggccttgaccagacctggaacgtcaccgcgcatagcggcctgacgcagcatgttacgcgcaagaccgaacttgcgataaacaccatgcggacgaccggtcaggcggcagcgattgcgcaggcgagatgcactcgcgtcgcgcggctgcttctgcaacgcaacctgagcttcccaacgcgcttccggagtggattccgggttagcgatgatcgctttcagcgcggcacgcttctgggcgtacttggcaaccgtctgctgacgcttcagctcgcggttcttcatgctttgcttagccatgtgcctactccaatcagttacggaacgggaagttgaaggcacgcagcagtgcgcgaccctcttcatccgtccgagcagtagtggtcagagtgatgtccagaccacgcagggcatcgatcttgtcgtaatcgatttccgggaagatgatctgctctttgacgcccatgctgtagttgccacggccgtcgaacgacttggcattcaggccgcggaagtcgcggacccgaggcagggagatcgacagcagacgatccaggaactcatacatacgatcgctgcgcagggtcaccttgacgccgatcggccaaccttcgcggaccttgaagcctgcgatggatttgcgagcgtgagtcacgacgaccttttggccggtgatcttttcaagatcagcaacggcgttatcgatgattttcttgtcaccgatcgcctcgccgatacccatgttaagggtgatcttggtgatgcgcggaacttccatcacgttgccgagctgaagttcttctttcagcttgggagcgatttgcttccgataaacttcttttagtcgtgccatggttatctacctagcagtctcaagcttcaaccggcttttgggtcgacttgaagacacgaattttcttgccgtcttcaaccttgaatccaacgcggtcagccttgttggtttcgccattgaagatagcgacgttagaggcgtgcagtggcgcctctttctcgacgataccgccctgaacgcccgacatcgggttcggcttggtatgacgcttgaccaggttgatgccaccgacgaccagacggtcgtcagcgagaacccgaagcaccttaccgcgcttacccttgtctttgccggcgatgacgatgatctcgtcgttgcgacgaatcttttgcatgcggcttctccttacagcacttcaggcgcgagcgagacgatcttcatgaacttctcggaacgaagttcacgcgtcaccggcccgaaaatacgggtgccaataggctcctgcttgttgttcaacagaacagcagcattgccatcgaagcggataatggagccgtccggacgacgaacaccgtgacgggtacggactacgacagcagtcattacctggcctttcttgaccttgccacgcggaatcgcttccttgacggtaaccttgatgatgtcgccgatgccggcgtaacggcggtgcgaaccgccgaggaccttgatacacatgacgcgacgagcgccactgttatccgccacatcgagcattgattgagtctgaatcatataatttctccgacccctagcccttagacttcgacggcacgttcaacgacatcaaccagcatccagcacttggtcttcgccagcggacgagtctcgcggatagtgaccttgtcgccgatacggcactggttggtttcgtcgtgggcgtgcagtttggtcgaacgcttcacgtatttaccgtagatcgggtgcttgacgcgacgctcgatcagaacggtgatgcttttgtccatcttgtcgctgacgacgcggccagtcagcgtgcggacagttttttcaacttcagccatgatcacttacctgcctgctggttgagcacagtcttgacacgagcgatgtcgcgcttgacttgcgagagcaggtgagactgccccaactggccagttgctttctgcatgcgcagattgaactggtcgcgcagcagctcgagcagttgctcgttcagctgctgagcggatttttcacgaagttcattcgctttcatcacatcaccgtccgcttaacaaaggaggtggcgagcggcagctttgcagcggccagggcgaatgcctcacgcgccagctcttcggaaacaccctcgatctcgtagagcaccttgcccggttgaatctgggctacccagtactcgacgttacccttacctttacccatccggacttccagaggcttcttggtgacaggcttgtcggggaacacgcggatccagatcttgccgccacgcttcacgtgacgggtcaacgcacgacgtgcggactcgatctgacgcgcggtgagacgaccacgcgcaacagacttcagagcgaactcgccgaagctgactttgctaccgcgctgagccagaccacggttgtggccggtcatctgcttgcggaattttgtacgcttgggttgcaacatttggcgtactccttacttggcagcttttttacgaggcgcaggcgcttgcggcttgagctcttcatggcgaccaccaatcacttcgcctttgaagatccagaccttgacgccgatcacaccgtaggtggtgtgcgcttcgtaggtgttgtagtcgatatcggcacgcagggtgtgcagcggcacacgaccttcccgataccattccgtacgggcgatttcagccccacccagacgaccgctcacctggatcttgatgcccttggcaccaatgcggatcgcgttctgtacggcgcgcttcatggcgcgacggaacattacgcgacgctccagctgctgagcgacgttctgtgctaccagcattgcatcgagttccggcttgcggatttcttcgatgttgatgtgcaccggcacacccattttcttggtcaggtcctgacgcagcttctcgacatcttcacctttcttgccgatcacgataccgggacgagcagtgtggatggtgatgcgtgctgtctgagccggacgatggatatcgatacggcttacggacgcgctttttagtttgtcttggaggtactcacgcacgttcagatctgcaagcagataatcggcgtacgtacgaccgtctgcgtaccagacggaagtgtgctccttgacgattcccaggcgaatgccagtgggatgtactttctgacccatctgatcgactccgttacttgtccgcaaccttgacagtgatatggcaagaccgcttgacgatgcgatcagcgcggcctttggcacgcggcatgatgcgcttaagcgaacgcccctcgttgacgaagacagtggaaaccttcaggtcatccacgtcagcgccttcgttgtgctcggcgttggctacggccgactccagcactttcttcatgatctcggcggctttcttactgctgaaagccagcaggttgagcgcttcgcccaccttcttcccgcggatctggtcggcgaccaggcgggctttctgggcggagatgcgagcgcccgacaacttagcggctacttccatctttccttaccccttagcgcttgcctttcttgtccgctacgtgcccgcgataggtgcgggtaccagcgaactcgccgagtttgtgaccgaccatgtcttcgctcacgagaacggggacatgttgacggccgttatgcacagcgatggtcagaccgaccatttgcggcaggatcatcgaacgacgcgaccaggttttaaccggcttgcgatcgttcttctccatcgccacttcgaccttcttcaataggtgaagatcgataaaaggaccttttttcagagaacgcggcactgtcgtatccctctagttacttgcgacgacggacgatcatgttatcggtgcgcttgttagagcgagtcttcgcgcccttggttgggaagccccatggcgacaccggatgacgaccaccggaggtacgaccctcaccaccaccgtgggggtgatcgaccgggttcattgccacaccgcgaacggtcgggcgaacaccgcgccaacgcttggcaccggctttacccagcgaacgcaggctgtgctcggagttcgagacttcgcccagggtcgcgcggcattcagccagcactttgcgcatctcgccggagcgaagacgcagggttacataggcgccttcacgcgcaaccagctgagccgaagcaccagcggagcgagcgatctgagcacccttgcccggcttgagctcgacaccgtgaacggtggaacccagcggaatgttgcgcagcggcaggctgttaccagccttgatcggcgcgttgacgccggagagcagctgatcgccagccgtcacgcctttcggcgcaatgatgtagcgacgctcaccgtcggcgtacttcagcagcgcgatgtgcgcagtacggttcggatcgtattcgacgcgctcgacgatggcagggatgccatccttgttgcgacgaaaatcgaccagacggtaatgctgcttatgaccacccccgatgtgacgagtggtgatacgaccgttgttgttacgaccgccagacttcgacttcttctcgagcagcggagcataaggagcgcctttgtgcagctcctgaccgaccactttgaccacaaaacggcggcccgcggaagtcggtttgcatttaacgattgccatgatgcaccccttccttactcagcattgccggagaaatcgagatcctggcccggctgaagcgcgatgtacgccttcttccagtcgttacgcttgcccaggccgcgagcggtgcgcttggtcttgccctgaacattcagggtgctgaccttggcaactttcacgttgaacaggctttcgacggccttcttgatttccagcttggttgcatcggtcgcaaccttgaaaacgaactggctcttgctgtcggccagcatggttgccttctcggagacgtgcggaccaagcaggactttgaatacgcgttcctggttcatcccagcagctcctcgaatttcttcacagccgacacggtgatcaacaccttgtcataggcgatcaggctgacaggatccgaaccctgcacatcacgaacatcgacgtgcggcaggttgcgagctgccagatacaggttctgatcaacagcatcggagacgatcaaaacatcgttcaggcccatgccagtcagcttgttggcaaggagcttggtcttggggctgtcaaccgcgaaatcttcaacaacgaccagacgctcggagcgaaccagctcggagaggatggagcgcagcgcagcgcggtacatcttcttgttgagcttctgctcatggttctgcgggcgagcggcgaaagtgacaccaccgccacgccagatcggactacgcgaagtaccggcacgtgcacgaccggtacccttctggcgccagggacgcttgccgccaccggatacgtcggagcgggtcttctgctgcttgctaccctgacgaccgccagccatgtaggcgacgactgcctggtgcaccagcgtctcgttgaactcaccaccaaaggtttgctcggagacttcgatggcttgtgcgccattaacattcaattgcatgtgaactcccccttacccgcgagccttggcagccggacgcacgacaacgtcaccgccagtggcgccgggcactgcgcccttgaccaacagcagattacgctcggcatcgacacgcacgatttccagggactgcacggttacgcgctctgcgcccatgtgcccggacatcttcttgcccttgaaaacacggcctggagtctggcattggccaatcgaacccgggacgcggtgggatacggagttaccgtgggtattgtcctgaccgcggaaattccagcgcttgatggtaccggcgaagcctttacctttggactgaccggtgacatccaccatttgtccagcctggaagatttcagcgttgatctggtcaccaacctggaactcctcgccatcgaggcggaattcccagacgccacgaccggcagccacgttcgccttggcgaaatgaccggcctgagccttggtaacacgggacgcacgacgctcaccgactgtaacctgcacagcacggtagccatcgctttcttcattcttgaattgagtgacgcgattcggctcgatctcgatgaccgtaaccggaatagagacaccatcttcggtgaaaacgcgggtcatgccgcatttacgaccgactacaccaatagtcatgttgtaacctcttgagtgtacggggctttcacccgctatggccgcccatttcagagcgttacacgactaaaactctaggttttagccgaggctgatctgcacttccacgccagccgcaagatcaagcttcatcagcgcatcgacagtcttgtcggtcggctggacgatatccagcacacgcttatgagtacggatctcgtactggtcgcgcgcatccttgttgacatgcggtgaaaccagaacagtgaaccgctctttgcgggtcggcagtggaatcggaccacgcacctgagcaccagtacgtttcgcggtttccacgatttcctgggttgattgatcgatcaggcgatggtcaaaagccttcaaccgaatacggatttgttggttttgcattttgacctcagactccaattagccatccctaccaaacgcaatacgcccggtaaaaggaggcgcaattgtacggatgcgtccagggggtgtcaataattgatcaacaatagaaaaagggccccgaggggccctttccgacatcgaaaaacttattcgacgatcttggcaaccacgccggcgccaacggtacggccaccttcgcgaatcgcgaagcgcaggccgtcttccatggcgatcggcttgatcagggtgacaaccattttcacgttgtcgcccggcattaccatctcgacgccttccggcagttcgcacgaaccggtcacgtcagtggtacggaagtagaactgcggacggtagcccttgaagaacggggtatgacgaccaccttcttccttggacagaacgtagacttcggcttcgaacttggtgtgcggcttgatggtgcccggcttggccagaacctgaccacgctcgacgtcatcacgcttggtgccacgcagcagcacaccacagttctcacctgcacgaccttcgtcgagcagcttacggaacatctcgacaccggtacaggtggtcttggtggtagcgcgcagaccaacgatctcgatttcttcctggatcttgacgatgccacgctcgacacgaccggttaccacggtgccgcgaccggagatcgagaagacatcttcgatcggcatcaggaacggcttgtcgatggcgcgaaccggctctgggatgtaagtatccagagtctcgacgagcttcttgacggcagtggtgcccatctcgttgtcgtcctggccgttcagagccatcagcgcggagccgatgatgatcggagtgtcgtcacccgggaaatcgtaagtgctgagcaggtcgcgcacttccatttcgaccagctcgagcagctcggcgtcatcaaccatgtcagccttgttcaggaagacaacgatgtaaggaacgccaacctgacgggagagcaggatgtgctcgcgagtctgcggcatggggccgtcagctgcggagcagaccaggatcgcaccgtccatctgggcagcaccggtgatcatgttcttcacatagtcagcgtgacccgggcaatcaacgtgcgcgtagtgacgaatattggagtcgtactctacgtgagcggtgttgatggtgataccgcgagccttctcttccggcgcgctgtcgatcttgtcgaagtcgacacgagcggaaccgaaaacctcggagcatacgcgggtcagagcggcagtcagagtagtcttgccatggtcgacgtgaccaatggtgccgacgttgacgtgcggtttgttacgttcgaatttttccttagccacgacagtaaacctcttacttaaagggcggaattaaccttgttttttaacgatagcttcgacgatgttcgccggagcctctgagtacttcgagaattccatggagtagctggcgcgaccctgggacatggaacgaacatcggtcgcataaccgaacatttcgcccagcggaacttcggcacggattaccttaccggaaaccgaatcttccattccctgaatcagaccacgacgacggttcaagtcacccatcacgtcgcccatgtaatcttcaggcgtcactacctcgaccttcatgatcggctcaagcactacagcgccgcccttctgggacagctgcttggtcgccatggaggcagccaccttaaacgccatctcgttggagtcgacgtcgtggtaggaaccatcgaaaacggtcgccttcaggccgatcagcggatagccggcgacaacgccgttcttcatctgctcttcgatacccttctggatcgccggaatgtattccttcggaatgacaccaccgaccacttcgttgacgaactgcagaccttcctgaccctcatcggcaggcgcgaaacgcacccagcaatgaccgaactggccacgaccgcccgactgacgaacgaacttgccttcgatctcgcaagacttggtgatcttctcgcgataggacacctgaggcttaccgatgttggcgtcgacgttgaactcgcgacgcatacgatcgaccaggatatccaggtgcagctcacccatcccggagatgatggtctgaccggtttcttcgtcagtcttgacgcggaaagacggatcttcctgagccagcttgcccagtgcgatacccatcttctcctggtcagccttggttttcggctctaccgctaccgaaataaccggctcggggaagtccatgcgctcaagaatgatcggcttctcgatcgagcagagcgtgtcgcccgtggtgacatccttcatgccgatcagcgcagcgatatcgcccgcacggcactctttgatctcctcacgctggttggcgtgcatctgcaccatccggcctacgcgctctttcttgcccttgaccgagttcatcaccgagtcaccggaagccagcacacccgagtacacccgggcgaacgtcagggtaccaacgaacggatcggttgcgatcttgaaagccagcgccgagaagggctcggagtcgtcagcatgacgctcgtcggtctcttcctcgttatcaggattgacgccctgaatagccggaatctcggtcggagcaggcaggaagtcgatgacagcatcgagaaccagcggcacacccttgttcttgaacgacgagccacaaaccgccggaacgatttcacaagcgatggtgcgctgacgcagaccttctttgatctcttcgttggacagctcgccgccctcgagatacttgttcatcagctcttcgttagcttcggcagcagcctcgaccatgttcgagcgatattcctcagccatgctgagcagctcggcagggatctcctcctcacgataggaggtacccttgtcttcttcgttccagtagatagccttcatcttgatcagatcgatctgaccttcgaagttatcctctgcaccgatcgccagctgcaccggcaccggcgtatgaccgagacgctgcttgatctgacccactacgcgcaggaagttagcgccagcacggtccatcttgttgacgtacacgatgcgcggaacgccgtacttgttggcctgacgccagacggtctcggactgcggctcaacgccggaggtaccgcagaacaccacgacagcaccgtccagcacgcgcagcgagcgctcaacttcgatagtgaagtcaacgtggccgggggtatcgatgacgtttacgcggtacttgtcgaactgaccacgcgaaccctgccagaaggtagtcacagcagcggaggtaatggtgataccgcgctcctgctcctgcaccatccagtcagtggtcgcggcaccgtcgtgcacttcgcccatcttgtggctgaggcctgtgtagaacagaatccgctccgtagtggtggtcttacctgcgtccacgtgggcgcagataccaatattacggtagcggttaatcggagtattacgagccataaagccctcgcgagttgttgacgctgaaattagaagcggtagtgcgagaaggccttgttggcttcagccatgcgatgcacatcttcacgcttcttgacagcagcgcctttaccttcaaatgcatccaccagctcgcctgcaagacgcagagccatggatttctcgccacgcttgcgcgcggcgtccaccagccagcgcatcgccaaggcgttacggcgggacggacgaacttcgaccggaacctggtaagtcgcaccacctacgcggcgggacttcacttcgaccagcggagcgatggcgtcgagtgctttttcgaagatttccaggggatcgctgttcttgcgctctttgaccttgtccagcgcgccataaacaatacgctcggcaacggccttcttgccgctctccatcacgtggttcatgaacttggccaggatcagacttccgtatttcggatcgtcaaggatctcgcgcttggctgctacacgacgtcttggcattgataagccctcaaacggtcttcaggttagctcgggactataacgacgaggttacgcccgaccttactcttatcgactcagataaataaaaatacgattacttcggacgcttggcgccgtacttggagcgaccctgcttacgatccttgacgccagaggtatccagcgaaccgcgcacggtgtgatagcgaacacccggaaggtcttttacacgaccgccacggatcagcacgacgctgtgctcttgcaggttgtggccttcaccgccgatataggaggcgacttcaaagccgttggtcaggcgaacacggcacactttacgcagtgcggagttcggtttctttggcgtggtggtgtacacgcgagtgcacacgccacggcgttgcgggcagttctgcagcgcagggacgtcgcttttctcgacgacgcgcttgcgcggctggcgtaccagctggttgatcgttgccatctactagctccactgttgtctttcgacacaaacgaaaaatggcagggcgcagggccccgccaaattaggggtacaagagtctaaagagcttcttgcacaccgtcaaggttcaccccggatcgctccggggtgtcccccattagttgccgctggaattcagcgcctcggtcagcgctgcttcgacttcgtcggcactcacacggactggcttctcggcatcccgcttgcgcttgcgctcgctgtggtactgcaagccagtaccagccggaatcaggcgacccaccacgacgttctctttcaagccacgcaggtagtcgcgcttgccagtaacggcggcctcggtaagaacgcgagtggtctcctggaacgatgccgccgaaatgaacgactcggtcgacagcgacgccttggtgatacccagcaggacccgcacgtacttggagctgaacttgtcgtccccggagagccgctcgttctcttccagcacctgcgtgagctccatctggtcgcccttgatgaagctggagtcacccgactcagctacctcgaccttgcgcagcatctgccgcaggatggtctcgatgtgcttgtcgttgatcttcacgccctggaggcggtacacgtcctggatctcgttgacgatgtacttggccagcgcgctgacgcccagcagacgcaggatatcgtgcgggttgcttggaccgtcggagataacttcgcccttgtttacctgctcgccttcgaagacgttcaggtgacgccacttcggaatcagctcttcgtacggatcggttccgtcggtgggcgtgatcaccaggcgacgcttgcccttggtttccttgccgaaggaaatcgtaccgctgatctccgccaggatggacggctccttcggacgacgcgcttcgaacaggtcggccacgcgtggcagaccaccggtgatgtcgcgggtcttggaagtttcctgcgggatacgtgcaatgacgtcgcccacattgatttccgcaccgtccgccacaccaaccaaagcgttggccggcaggaagtactgcgccggaacgtcggtgcctggcagcagcagctccttgccgttggcatcgaccattttgatcgccgggcggatgtccttgccggacgccgggcgatccttcggatccatcacttcgatgttggtcagaccggtgagttcgtcggtctggcgcttgatggtgatgttctcttccatgccagcgaaggtcacgacacccttcatctcggttacgatcgggtgcgtgtgcggatcccacttggccactacagtacccgcgtcgaccttgtcaccttccttgatagagatgaccgcaccgtacggcagcttgtagcgctcgcgctcacgaccgtagtcgtcagcgaccgccaactcaccggaacgcgataccgcgatcagcgcaccgtcagcgcgctcgacgtacttgaggttatgcaggcggatggtaccgccgttcttcaccatcacgttgtcgacagccgaagtccggctggccgcaccaccgatgtggaacgtacgcatggtcagctgagtacccggctcaccaatcgactgtgcggcgataacaccgactgcctcaccgatgttgaccaggtgaccacgcgcgagatcgcggccgtagcacttggcacagatgccgtagcgggtttcgcagctgattggcgaacgcacgatcacttcgtcgatgctgttcagctcgatgaagtcgacccactgctcgtcgatcagagtgccagccgggaccagcacatcgtcggagccgggcttgagtacgtcacgcgcaatcacacgacccagtacacgctcacccagcggctcgaccacgtcgccgccttcgatgtgcggcgtcatgtgcagaccctgctcggtgccgcaatcgatctcggttaccaccagatcctgcgccacgtcgaccagacgacgggtcaggtaaccagagttcgcggttttcagtgcggtatccgccagacccttacgagcaccgtgagtggagatgaagtactgcagtacgttcagaccttcacggaagttcgcggtgatcggcgtctcgatgatcgagccgtccggcttggccatcaggccacgcataccggccagctgacggatctgggcagcggaaccccgcgccccggagtcagccatcatgtacatcgagttgaacgagtcctgctcggcttcgttgccgtcgcggtcgatgaccttctctttcgagaggttggccatcatcgccttggagacttcgtcgttggccttcgaccagaggtcgatcaccttgttgtacttctcgccctgggtcaccaggccggaggcgtactgcgactcgatctccttaacttcctcggtcgcggcgtcgatgatgcgcgccttttcgtcagggatgacgaagtcgttcacgccgatggatacgccggaaattgtcgaataggcgaaaccggtgtacatcagctgatcggcgaagatgacggtgtccttcagaccaacggtgcggtagcacaggttgatcagcttggagatcgccttcttcttcatcggctggttgaccacgtcgaacggcaggccggcgggaaccacctggaacagcagcgcgcggccgacagtggtgtcgacgatgcgggtgttcttggtgatcgagccgtcacgatccttgatggtctcgttgatgcgaaccttgacgcgggcgtgcagcgacgcttcgccggcgcggaatacgcggtcgacttcctgcaggtcggcaaacacacgaccctcgcctttggcattgatggcttcgcgggtcatgtagtacagacccagaaccacgtcctgcgacggcacgatgatcggctcaccgttggccggcgacaggatgttgttggtcgacatcatcagcgcgcgcgcttcgagctgggcttccagcgtcagcggcacgtgaacggccatctggtcaccgtcgaagtcagcgttgtatgcggcgcagaccagcgggtgcagctggatcgccttaccttcgatcagaaccggctcgaatgcctggatacccagacggtgcagcgtcggcgcacggttgagcagcacgggatgttcgcggatcacttcggccaggacgtcccagacttccggcagctcgcgctcgaccatcttcttggcggccttgatggtggtcgccatgccacgcatttccagcttgccgaaaatgaacggtttgaacagctcgagggccatcttcttcggcagaccgcactgatgcaggcgcagggtcgggccgacggtgatcaccgaacgaccggagtagtccacgcgcttgccgagcaggttctgacggaaacgaccctgcttgcccttgatcatgtcagccagggacttgagcgggcgcttgttcgagccagtgatggcgcgaccacgacgaccgttgtcgagcagcgcgtccacggcttcctgcaacatgcgcttttcgttgcgcacgatgatgtccggcgccgacagatcgagcaggcgcttgagacggttgttacggttgatcacccggcgatacagatcgttgagatccgaggtcgcgaagcggccgccatccagcggaaccagcggacgcaggtccggcggcagtaccggcagaacggtgagcaccatccactccggcaggttgcccgaaccatggaaggcttccatcagcttcaagcgcttggatagcttcttgatcttggtttccgagttggtctgcgggatctcttcgcgcaggcgaccgatctcgtgctccagatcgatttcgtgcagcagctcgcgcacggcctcggcacccatgcgggcgtcgaagtcatcaccgaactcttccagtgcttcgaaatactgctcgtcattgagcagctgacccttctcgagcgtggtcatgcccggatcgatcaccacgtagctctcgaagtagagcacgcgctcgatgtcgcgcaaggtcatatccagcagcaggccgatacggctcggcagcgacttcaggaaccagatgtgggcaactggcgaggccagctcgatgtgcgccatgcgctcacggcgaaccttggccagcgcgacttccacgccgcacttctcacagatcacgccacggtgcttgaggcgcttgtacttgccgcacaggcactcgtagtccttgaccggaccaaagatcttggcgcagaacaggccgtcacgctcgggcttgaacgtacggtagttgatggtctctggcttcttgacctcgccaaaggaccaggaacggatcatctcgggcgaagccaatgcaatcttgatggcatcgaactcttcgatttgaccctggtttttcaacagattcagcaagtctttcaaggcctttcctcctcacggacctgcgatgaccggctgatgccgatcaccgcatagcggtgcgtggttattcggtttccagatcgatgtcgataccgagcgagcggatctctttgatcaacacgttgaaggattccggcatgccgggctccatgcggtgatcgccgtccacgatgttcttgtacatcttggtccgcccgttcacgtcgtccgacttgaccgtgagcatttcctgcagggtataggcggcgccataggcttccagcgcccagacctccatctccccgaaacgctggccaccgaactgcgccttaccgcccaacggctgctgggtaaccaggctgtaggaaccggtggaacgcgcgtgcatcttgtcgtcgaccaggtggttcagcttgagcatgtacatgtagccgacggtggtggtgcgctcgaacttgttaccggtgcggccatcgtacagctgcatctggccactctctggcagatcggccagcttcagcatggccttaatctcccgctccttggcgccgtcgaacaccggcgttgccatcggcacgccgccacgcaggttcttcgccagatccagaacttcctgatcgctgaactcgtccaggttttcctggcggccaccgatctcgttgtagatctcggtcaggaacttgcgcagttccgcgactttgcgctgctcctccagcatgcggttgatcttctcgcccagccccttggccgcgaggcccaggtgggtttcgaggatctggccgacgttcatacgcgaaggtacgcccagcgggttcagaacgatgtcgaccggcgtgccgttggcatcgtgcggcatgtcttcgaccggcatgatgaccgagacaacacccttgttaccatgacgaccggccatcttgtcaccaggctgaatacgacgcttgatggcgagatagaccttgacgatcttcagcacgcccggcgccagatcgtcaccttgctgcagcttgcgcttcttgtcttcgaacttgtcatcgagcaactggcgacgatcggaaatataggcctgagccttctccaactgctcgttcagcgcgtcttcggccatgcgcagcttgaaccactgcccatgctccagaccgtcgagaatctcgtcggtaatgaccgcgcctttcttcagaccggcaccgccttcgacagtggcacccaccaacgccgaacgcagacgctcgaaggttgcaccttcgacgatgcggaactcttcgttaaggtccttccggatctcgtcgagctgcatcttctcgatggccagcgcacgggagtcacgctcgacgccgtcacggatgaacacctggacatcgatgaccgtacccttggtgccagtaggcacgcgcagggaggtgtccttaacgtcggaagccttctcaccgaagatcgcacgcagcagcttctcttccggtgtcagctgggtttcgcctttcggcgtgaccttgccgaccagaatgtcgcccgcacccacctcagcgcccacatagacgatacccgcctcgtccagcttgttcagcgcagcctcgcccacgttggggatgtcagcggtgatctcttctggtccgagcttggtatcgcgagatacgcaggtcagctcctggatgtgaatggtggtgaaacggtcttcctggacaacacgctccgacaggaggatggagtcttcgaagttgtagccgttccacggcatgaacgcgacgcgcatgttctgccccagcgccagttcacccatgtcagtggacgggccgtcggccatgatgtcgccacgctcgaccacatcacccttgctcaccagcggacgctggttgatgcaggtgttctggttggaacgggtgtacttggtcaggttatagatgtcgacgccggcttcaccggtttcgacttccgcatcatgcacgcgcaccaccacacggctggcatcgaccgaatcgatcacgccgccgcgacgagccacgacgcaaacgccggagtcgcgcgccacgttgcgctccatgcctgtacccacgagcggcttgtccgaacgcaaggtcgggacggcctggcgctgcatgttcgaacccatgagagcgcggttggcgtcgtcgtgctcgaggaacggaatcaacgaagcggcaacggacacgacctgcttgggcgatacgtccatcagcgtcacgtcttccggcgccttgaccgtgaactcgttctgatggcgtacggcgaccagctcgtcgaccagcttgcggccgtccagcttggcgctggcctgggcgatcacatgatccgcctcttcgatcgccgacaggaatacgatctcgtcggtgacttcgccttccttcacgacacggtacgggctttccaggaagccgtactggttggtacgggcgtaggccgccagcgagttgatcaggccgatgttcggaccttccggcgtctcgatcgggcacacgcgaccgtaatgggtcgggtgtacgtcgcgcacttcgaagcctgcgcgctcacgggtcagaccgcccgggccgagtgcggagacgcggcgcttgcgggtgatctctgagagcgggttgttctggtccatgaactgcgacagctggctggaaccgaagaactccttcaccgcggcagcaaccggcttggcgttgatcaggtcctgcggcatcaagccttcgctttcggccatcgacagacgttccttgaccgcacgctccacgcgcaccaggcccacacggaactggttctcggccatctcgccgacacagcgaacgcgacggttacccaggtgatcgatatcgtcgactacgcctttgccgttacgaatgtcgaccagcgtcttgagcaccgcaacgatatcttcacggctgagcacgcccgacccttcgatctcggtacgaccgatacgacggttgaacttcatccgaccgacagcggacaggtcgtagcgctccgaggcaaagaacaggttgttgaacagcgtctcggctgcgtccttggttggcggctcgccaggacgcatcatgcgatagatttccaccaacgcttcgagctggttggtggtcgaatcgatcttcagcgtatcggagataaacggaccgcagtcgatgtcattggtgtacagggtttcgaagcgaacaacctgagccttgaccagcttggccagtacttcgacagtcagttcggtattgcactctgcgatgatctcgccagtcgccggatgcacgatggccttggccgtggtgcgacccaggacgtagtccatcggcatttcaagcgccttgatgccagacttgtcgagctggttgatgtggcgcgccgtgatccggcgaccctgctcgacgatgaccttgccggtttcgtccttgatatcgaaggacgcgatctcgccgcgcagacgctgcgggaccagctccaggctcagcgtctcacccttcacatggaaaacgttggtgtcgtagaacgcatcgaggatttcttcggtgctgtagttcagcgcgcgcagaagcaccgaagccggcagcttacggcgacggtcgatacgcacgaacacggcatccttagggtcgaattcgaaatcgagccaggagccgcggtaaggaatgatacgagcggagtacagcaacttgcccgagctatgagtcttgccacgatcgtgatcaaagaagacgcctggcgagcgatgcagctgagacacgatgacgcgctcggtaccgttgatgatgaaggtaccgttctcggtcatcagggggatttcccccatgtagacttcctgctctttgatgtccttgatcgccttgctcgacgattccttatcgaagatgatcaggcggactttcacacgcaacggcaccgcaaaggtcacgccgcgcaatacgcattctttgacgtcgaaagccgggtcgcccagacgatagccgacatactccagcgctgcattgccggaatagctgattatcggaaaaacggatttgaaggctgcatgcaagccaatatcgcggaactgatccttggtcgctcccgcctgcaggaattcgcgatacgaatccagctggatggccaaaagatacggcacgtccatcacgtgcggtaacttgctaaagtccttgcggattcgttttttctcagtgtatgagtaagccatcagcgttccccagcttggtcacctgcttgtttggcctctcccgacgggagcagccagaaaatcttgcgaatcccttgattcgcgccgcccatcggggcggtttttccgcttcatccgctcgataaacatcatgcggctataacggaaaaaggccggtggcaaaagccaccagccatcagccttatgcgagtcgcttcggctgtagacgcaaggtcgtgcttacttgagctcgactttggcgccagcttcttccagagacttcttggcggcctcggcctcttccttggaaacgccttccttcacgacgccaggagcgccgtctacgacagccttggcttctttcaggcccagaccggtcagttcgcgaacagccttgatcacgtttactttcttgtcgccagcttcagccaggacaacggtgaactcggtctgctcttcagcagcggcagcagccgggccagcggccgcgacggtagcagcggcggcagttacgccgaacttctcttccattgccttgatcagttcaacaacctgcatcacggacatttcggaaacggcgttgatgatatcttcgttggtcagagccatgactctagttcctgtatataggtgacggcctgcggccatctaaatcaaaaagaaattcgaagttgcctcgcatgccttaggctgcggcggcttccttctggtcgcgaacggccgccagagtacgagccagcttgctggtagcgccttgaatcacgctcatcagctgcgaaattgcctcgtcgtaggtcggcagggttgccaaagcatcgatctggttggctgcgatgaactgaccctcgaacgcagcagccttgatctcgaacttgtcctgacccttggcgaactccttgaagatacgggcagcagcgcccggatgctcattggagaatgcgataagggtcgggcccttgaacacgtcgctgagcacatcgtactgagtgccttcaacggcgcggcgcagcagggtgttacgtacgacacgtacgtagacacccgcgtcgcgggcctctttacggagtccggtcatggctcccacggtcacgccacgggcatcggccacgacagcggacagggcagctttggcagcctcgttgacttcagcgacgatggccttcttgtcttcgagtttgattgccacgggtttttactcctggatgttaccggttcgcccagtcaagaccgggcgggttttggtgtctgattcggtacgaatcgggagcacctctgcgtaggcttgaaaaaaacaacgtttcttcggtttaagacttgcgtcgcctacggtcttggatagcccccgccaggcagggaccccaatctgtcgcgccctgccaagcagggcgccaaatgccttacgcttcgagcgaggcctgatcgatgaccagccctgggcccatagtggtgctcagggtgacgcgcttgacatatatgcctttggacgtggacggcttcaaacgcttgaggtccgacagcagcgcctcgacattctgcttcagctgtccagcttcgaagcccaccttaccaacggaggtgtggatgataccgttcttgtcggtacggaagcgcacctgaccggccttggcgttcttgactgcagtcgcgacgtccggcgtcacagtgccaaccttcgggttaggcatcaggccgcgcggaccaaggatctggcccaactggcctacgacacgcatcgcgtccggggaggcgatgactacgtcatagttcagatcgccgcccttcatctcggcagccagctcgtccataccaacgcgatcagcaccagcagccagagcagcctcggcagccggcccctgagtgaacacagcaacacgaacggttttaccggtgccgttcggcagaacggtagcgccgcgtaccacctgatcggatttccgaggatccacgcccaggttgatggcgatatcgaacgactcggtgaacttgacggccgacagctgggacagcagcgtcgcggcatcttcgaacgagtactgcttgccggcttcgatcttctcggcgaaagccttctggcgcttggtcaacttagccattacacaccctccacgttcaggcccatgctgcgagcggagccggcgatggtacgcacggccgcctcaagatcagcagcggtaagatcggcgttcttggtcttcgcgatctcttccagctgagcacgagtaacggtgccgactttctgggtgttcggacgagcagaaccactggtgataccggcagccttcttcagcagaacggcagcaggcgtactcttggtctcgaaggtgaagctacggtcgctgtaaacggtgatgatcaccggagtcggcagaccgggctcctggccttgagtgcgggcattgaatgccttgcagaattccatgatgttgacaccatgctgacccagtgcaggaccaactggcggcgacgggttggcctgaccggcctttacctgaagcttgatataagcttgaatcttcttagccataactactccgttccgggtgctagcgcctcgcggctcccctgtttacttgaatatcccagtgacgacaaaaccccgcagccagtagctgcggggtgtgggatgcttgtttcagttagaccttctcgacctgactgaactccaactctaccggcgtcgagcgaccaaagataaggaccgcaacctggatccggctcttctcgtagttgacttcctcgaccacgccgttgaaatccgcaaaaggaccgtcagctacgcgaacaacctcacccggctcgaacagagtcttaggtttcggcttgtcgctaccatccgccacacgacgaagaatcgcttcagcttctttatcggtaatcggcgccggcttatcagccgtgccaccgataaagcccatcacgcgaggcgtatccttgaccaggtgccacgcaccttcggccatatccatctggacgagcacataacccgggaagaacttgcgctcactcttgcgcttctgcccgttacgcatctcgaccacttcttcagtgggaaccaggatttcgccgaaatgatcttccataccggcaagcttgatacgctcgatcagcgagcgcatgacgtgcttctcgtaacccgagtaagcatgaaccacataccagcgcttagccacggaacacccttaacctacaaccatggaaaccagccaaccgagcagggaatcaagcccccacaacagcagcgccataaccagcacaacagccacgacaatcaaagtggtctgagtggtttcttgacgggtcggccaaacgaccttgcgaatctcgacgcgcgcctctttcagcaagacaaaaaaggagcgacctttggacgtctgcagcgccacaaaagcggcaaccacagcgaaagcgagcaacgcgaggactctatacaggattggctctgcggagtaatactgattaccaaccaccgccacaaccaccaaagcagccacaacaagccacttcaccagatcgaagcgcgtgtctttggcttctgctttgatattcatctgctagaaccctgtaaaaactgccaaattcgatattgaagttggcaggccaggagggaatcgaacccccaacctgcggttttggagaccgccgctctgccaattgagctactggcctaacaagagtcaggccgactattatgccggcccgaatggatcagatcaatcgattattcgatgatctttgcaaccacgccggcaccaacggtacgaccaccttcgcggatcgcgaaacgcaggccgtcttccatggcgatcggagcgatcagagtgacaaccatcttgatgttgtcgcccggcattaccatttcgacgccttccggcagctcgcagttaccagtcacgtcagtagtacggaagtagaactgcggacggtagcctttgaagaacggcgtgtgacgaccaccttcttccttgctcagcacgtagacttcgccttcgaacttggtgtgcggcttaatggtgcccggcttggccagaacctgaccacgctcgacatcatcacgcttggtgccacgcagcagcacgccaacgttctcacccgcacgaccttcgtcgagcagcttgcggaacatctcgacaccggtgcaggtagttttggtcgtggcacgaataccaacgatctcgatttcttcctgaaccttgacgatgccgcgctctacacgaccagtcacaacggtaccgcgaccggagatcgagaacacgtcctcgatcggcatcaggaacggcttgtcgatggcacgctcgggctccggaatatagctatccagagtctcgaccagcttacgcacagccgatacgcccatctcgttatcgtcctggccgttcagagccatcagcgcggaaccaatgatgattggcgtatcgtcgcctgggaagtcgtaggtcgacagcaggtcacgcacctccatctcaaccagctccagcaactcagcgtcgtccaccatgtcagccttgttcaggaagacaacgatgtaaggaacgccaacctggcgagacagcaggatgtgctcgcgagtctgcggcatggggccgtcggcagccgagcaaaccaggatcgcgccgtccatttgggcagcaccggtgatcatgttcttcacgtagtcagcgtggcccgggcagtcaacgtgagcgtaatgacggatcgaggaatcgtattcaacgtgagaggtgttgatggtgataccacgagccttctcttccggcgcgttatcgatctgcgagaaatcacgcgcagaaccgccccaggtctcagcacagaccttggtcaacgcagcagtcagagtcgtcttgccatggtcgacgtgaccaatggtgccgacgttcaggtgcggtttgttacgttcgaatttttctttagccatcgagaccgtctcccatcgttgaattgagctagtcacgccaccattaaaacaaaggcagatatttacatatctgcctttgggtttggagctcatgagcggatttgaaccgctgacctcacccttaccaagggtgtgctctaccaactgagctacatgagcgtatctgatcgcgcagacacctagaacctggagcgggtagcgggaatcgaacccgcatcatcagcttggaaggctgaggttctaccactaaactatacccgcgaaacctatggcctacgctagaatctggtggagggggaaggattcgaaccttcgaagtcgatgacgtcagatttacagtctgatccctttggccgctcgggaacccctccaaaacgaggcggcattttcatcgccaaccccttgtctgtcaagccttttctcatcaaaacatgatgatcagctgagagacagcgcttggcgagaaaatacatccgcctgccaagcgggcgccattctatgtagattgtcctgaagttgcaatgcttgaacagggtatttgttgatgctcgagtccagggaagtccctcatgaactcggcgagcagtgcatcggtcagaagctgctggcttgcgcccgctatgcgcacccaatagcggcgatgagtacgtggcaactcccggatcatcgccgtatagtcgacgcccttcagacgagccacaacgctttccgccgagtccttgcgcgaaaatattcccagggagatgccgttcgccagatctccaacggtaattatatagctatcgatattgcgcgactgtagctcacgcagttgccgcaatgacgcttgacgcgaaacaagcgggggaagatatacccaataatcgattcccgcggcctcatcgatgggctcaacctggacgtcgatatccaagctaagcaagcgctgttcaagggcgtgagcgatcgacgcctcatcgaaaccaccaagaaagaaacaactcttatcgacagactccgcaccaccacgacgcgccaaaggcttcgcctcgctcaacaacttgatgtcgccttctcgagcgggcaccgcaagcgaagcaccaccatgctcaaccggcgcagcctgattgaattgatataggtaaagaagcaggttcagcaataccagaagcattaaaagccagcgcatcgatacctcttcatgggcaggctatggccaggcctctgaaaaccaaatccggcacgcagttcaccgagggaaaatctgccacgagcgcggcgtctccaccggttacataaatagcgaactcatctcccagaggattttgggcgagggtaatctggctagagacataactgcgggccatcagcaaacagcccctctcaaccgcctctgcggtacttctacctggagacagatcacccaacgcaagcgccgtctctgcagaatcgtaccgtacgcgacgggtgtgagcgagcaattgaccccgcaaaagggcgattccaggcgcgatatagccgccgagatgcttgccatcacgagcgaccagatcaaccgtaatggccgtacccaaatcgataaccagacaggcgcccttgcataggttgtaagctgcgacaacagccagccagcggtctaaacctaaacgctgcgggtcccgataaccgttcaccactccgccaacattatgcgtcgagctggccttcgccacctccacctttaataacgcagaaagcccgcttactatcgcggcggtttcatcatcacttcttacgctgaccaatcgacaacgcgagatttcgccaatgttacgaccggacaactcttgagcgaggtcatccacgtgcgtcgtaacaccctccgcaacgggcgagcaaggagcctcgccgattactcgccacttgacgaagctgttaccgcagtcgagctcaagaatcatggtcgagcctcaagcttagttctcccccactaaatcgtttctcgccttgaccatcgacctgcatacgcagcgcaccctgatcatctataccaatcattagacctttaacctgctgggttccggtgcttaaggtgcagcgtttaccctgccaaagattgtttgcttgccactcatcacgcagtgaagaaaagccctcgagagcatgcctctccagataatgatgcagtgactcgctcaccaggttcgctagctcgctgcggttcgccaacgctcccgtctgagccctcacggacgtccagggctgaccgatctcctctgcaccggacgtcatgttcacgtttattccgataccgataatgacgtgacaaacatcggcaggatcacctgtcagctccaacaaaattccggcgatttttttaccatctgcatatatatcgttaggccatttgaggcccgcattactgacttccgccctacgcagcgctgccagaacggccagaccaaccaccagactgaggccagaaagtccttggggcccgctagagaccttaagcgccaaggtgtaatagagattctgtgcaggcgggctcgaccatgagcgccccctacggccgcgcccgctcgtctggctctcagcaagtaccacgaagggagccgtaattccggactgcagcaggcgcaatgcctcggcgttagtggaatcgacagtgtcccggagccagaaacgccaaccgaagtgggccagtccagcagagcagtcggcttgactcagcagcgaaagaggttctgcaaggcgataacctttccctgggactttgaatagcctaacgccacactcgctttcgagccgctgcagggacttccaaactgcgctccggctaacccccaatgcaaaaccaagctcctcgccagaatgaaatcgaccgtcgccgagcaaccgcagcaagttattcataagctcccctaactagcacgcaggcatgatagcggcacatctaaatccgagcgatatttataggcgatcaaagacaaacccccgaccc

SEQ ID NO: 20 - DNA, 365766 bp, Pseudomonas sp.
cgcaatcgaatgggtatggccgcgcccgcacgatctgtgggagcggtcttgaccgcgaaaaggcgagcaagcggctgaatgtttgctgctcgccgaaatagccgctattaacggctctggtttcttccgaaaccggctaaacctcgtgcagtcttcttcgcggtcaagaccgctcctacacagctgagcctgtaggccgcacgcggctgcagcggttcaccattgtcatgatgaggccggtgcgccggacaaagtcgtcgaaacagtctgtactggaggatgtccaaagcacgcatcccacgcagtcgaggtttccatgacacagctcttccagccgctcaccctgcgccagctgaccttgcccaatcgcatcgccgtgtcgccgatgtgccaatactcggcgaaagcgggaatggccaacgactggcatctggtccacttgggcagccgcgcggtgggcggggcggggttggtcatcatcgaggccaccgccgtaacggccgctggtcgcatttccccggaggatctcggcatctggtccgatgagcacgtcgagccgctacgacgtatcacccgcttcatcgaagcccaaggttcggtagccggtattcagttggcgcacgccggccgcaaggccagcacctggcagccctggctggggcggcacggcagcgtgcccatcgcggccggcggctggacgccagtagggccgtcggcgattgccttcgatccggaacatgcagtgcctaccgcactggacgagacgggtatcagggaagtgatccaggccttcgttcacgctgctgaacggtcgctggccgccggtttcaaggtggccgaggtgcacgccgcacatggttatctgctccatcagttcctctcgccgctctccaaccagcgtcaggacgcctatggcggatcgttcgataaccgcattcgcctgctgctggaggtgaccgaagccgtgcgggcggtatggccgcaagagttgcccctgttcgtccgtctgtccgctaccgattgggtgcaggatggctggaatgccgaggagaccgtcgagctggcgcggcggctgaagaccctgggcgttgacctgatcgatgtgtcatctggcggtacggcggtcaatgccgagatcccggtcggccccggctaccagacgcagtttgccgaaaaggtccggcgagaggccggcattgccaccggcacggtcggcatgatcaccgaggcggtccaggccgaacacatcctgcgtaccggccaggcggacctgatcctgctggcgcgcgagttgctgcgcgatccctattggccgctgcacgcagccgaagatctgggcgatagctccgtgccctggccggcccagtacgtacgcgcggcgcatcggaacacgccgatccggcagattcccgagtcgctcgactgagcgcgctccatcctttcaaggcaggtaattcatgaagaccaccggtttgctcgatcaactgctcaagtccgggcaggaccttctacaaaagcagcagggctccgttgcgcgctctggcaatgccaggagcggcggctcgctcggcgacatgctgtcaggggccggtggtccgctgggcagcctccttggtggcagtggtgccgggcgtggagccttggcgactggcgcgctcggcatgttactgggcagccggggtggccgccgtttgggcggcaaggtggtcacctatggcggcctggccgccctcggcatgctcgcctacaaggcctacggcaactggcaggcgcaacaggtacaacagcagggcggcgcagcgcaggcgaatgcgacacagacagagccgaagacggtcgatcggttaccgccggaccaggccgaggagcacagccgcggtattctcaaggcgctggttgcggcagccaaagccgatggtcacgtggacgatcaggagcggaagatgatcgaagccgaactggcccagctcaccgatgatcccgaactgcagcgttggctcgaggcagagctgaacaagccgctggatccggtggatgtcgccgcggttgcgaccacaccggaaatggcctcggaaatgtacctggccagcgtgctgatggttgacgaggagcagttcatggagcgcgcctacctcgatgagctggctcggcagctgaagctggatgcgcaattgaaggccgagctggaaagccaggtgcgcggcgtgtccgcttgaggctggcggccaggcccattggcgttgcacgttttcgcctggtttgaatcgtgtcgtggccggtggtccctggcgggctgtcagcggcggggtgctgcgctataatcgccggttttcgcaccgtccgattgagagctgcctacctatggaaatcaacccgatcctcaacagcatcaaggacctgtccgaccgcacccagtcaattcgggggtatctttgactacgatcagaagcatgatcgtcttgtcgaagtaaaccgcgaactcgaagacccgaacgtctggaacaagcccgagtacgcccagaacctgggccgtgagcgctccaccctggcgcagatcgtcgaaaccatcgatgacctcgagggcggccttgccgattcccgtgacctgctcgacatggccgtcgaagaagacgatcaaggcgccgtggatgacgtggccgccgagctggagcgtctgcgcggcattctcgaagggctggaattccgccgcatgttcagcggcgagatggaccccaacaacgcctacctcgatatccaggccggttccggcggcaccgaggctcaggactgggccaacatcctgctgcgcatgtacctgcgctgggccgacaagcgcggcttcagcgccgagatcgtcgagctgtccgagggcgaagtcgccggtatcaagggcgccaccgtacacatcaaaggcgagtacgcctttggctggttgcgcaccgagatcggcgtgcaccgcctggtgcgcaagagcccgttcgactcaggcgcgcgccgccacacctcattctcggcagtgttcgtctcgcccgagatcgacgacagggtcgagatcgagatcaatccggccgacctgcgcatcgacacctaccgctcctccggtgccggtggtcagcacgtcaacaccaccgactcggcagtacgtatcacccacgtaccgactaacactgtggtggcttgtcagaacgagcgttcccagcacgccaacaaggacaccgccatgaaaatgctgcgggcccggttgtacgagcaggaaatgcagaagcgcaacgcggcctcccaggcgctggaagacaccaagtccgatatcggctggggtcatcagattcgctcctatgtgctcgacgactcgcgcatcaaggatttgcgtaccggcgtggaacgtagcgactgccacaaggttctggacggcgacatcgaccagtacctcgaagccagtctgaagcagggcctctgaccgtcgattgcgtagcagaacgccagcttgctcttgacggtgcccttgacggggcgccgctgaggttgcgagcgagatcagcgacacgtcagagatatgcgcttcgcgagcgagactattgctacaagagcaggcgaaaacgcctgtcaggatcacgtgacacttaacctgtaggagcgagcttgctcgcgaatgcgttttaacaaggcaccgctggtgctcttggcgcatcagaccgggccagcgctcttcgcgaggcacgctcctacgtacaacacaccgcaacaacgcgctaggcactaaaacccatgagcgaacaaccgctgaaccagcacgccatccaagaggaagaaaacagcctgatccttcagcgcaaggaaaaactggccgccgagcgcgccaagggcaacgttttccccaacgacttccgtcgcgacagctactgcaacgacctgcagctgaaatacgcggacaagaccaaggaagagctggcagaagcggcgatcccggtgaaggttgccgggcgcatcatgctcaaccgcggcgccttcatggtcctgcaggacatgaccgggcgcatccaggtctacgtcaaccgcaagacgctgccggccgagacgctggaagccatcaagcattgggacctgggcgacatcatcgccgccgaaggcaccctggcgcgttccggcaagggtgacctgtacgtcgagatgaccgacgtgcgattgctgaccaagtcgctgcgtccgctgccggacaagcaccacggcctgaccgacaccgagcagcgctaccgtcagcgctatgttgacctcatcgtcaacgaggaaacccgccacaccttccgtgtgcgttctcaggtgatcggccatatccgcaagttcctcaacgagcgcgacttcctcgaagtcgaaacgccgatgctgcaaaccatccccggtggcgccgcggccaagcctttcgagacccatcacaacgccctggacctgccgatgttcctgcgtatcgcgccggagctctacctcaagcgtctggtggtgggtggtttcgagcgcgtgttcgagatcaaccgcaacttccgtaacgaaggcgtttcgacccggcacaaccctgagttcaccatgctcgagttctaccaggcctacgccgattacgaagacaacatggacctgaccgaagagctgttccgcgagctggcgcagctggttctgggcagcaccgacgtgccgtacggcgacaaggtgttccacttcggtgagccgttcgcgcgtttgtcggtgttcgattcgatcctgaagtacaacccggacatcagcgcggccgacctgcagggcatcgacaccgcccgcgccatcgccaagaaggccggcgccaaggtgctcggcttcgaggggctgggcaagctgcaggtgatgattttcgaggagctggtcgagcacaagctggagcagccgacctttatcacccgctacccgttcgaggtctcgccgctggcgcgccgcagcaacgacgacccgagcgtcaccgatcgcttcgagctgttcatcggcggccgtgaaatcgccaacgcctattccgagttgaacgacgccgaggatcaggccgagcgcttccatgcccaggttcgtgacaaggacgccggtgacgacgaggcgatgcatttcgatgccgacttcgtacgcgcactggaatacggtatgccgccgaccgcgggcgagggcattggtatcgaccgcctggtaatgctgctgaccaactcgccgtcgatccgcgacgtgatcctgttcccgcacatgcgtcccgaggtctgacgggcaaaggtgcatcttcggcggcgggtacacccgccctgcgggatcgcccaacatggccgatatgttggagatcatgcctttgtagggcgggtgcaacccaaggcggacggaggcgcaacatcgtgggtgcacgcggtttcggcggcggatttcacccgccctacggtcccgaccacgaaccggacacggatcgcgagggtccgctgatgtataagctcaaggctgcggatcatcactgacgaggtttggatgaattcccgtaacaacctggacgaatatcagctcacggtgcgcggcctgtccgaccgcatcgtcgaggcgcaaaccccggtgcgggtgctcgatgcggtgaagtgggacgacaacgttcgccaaggcttcttcgccagcggcgggcgcgagctgcccaaggtcgatcgcgcctactacgagggccggccgctggccttcgattccagcgcgaagaaggaagaattccagaacatcgaacgcgatatcacccgccagctggggcagttcaacccggtcgggcagatcatgcggcgcatgtgcaaggaataccgcatggtgatccgcatgctcgaagcgcgcggcaccgccgatttcggcctgatttcccaggagctctacggcgcggcgtccgatgccttccacgcgggcgatccgacgctcgccgatctcgggctgatgctctccgactacctgaacaacattgccgaccgcggcgatctgaaagacgaagccaaaaccctcaacgcgccgcaggcggtcgacatgctgcagcgccggctggatctggtgttcggcgaaggcgagggcgtgatccgcgtcttcgagtccgacggcatcctcgccgacgccgcggctggcgccgactacatcaagattcgcagcgacgcgatgttcaacgaacgtgacgtgcgcgcgctggaggtccacgaggggctggtgcacgtcggcaccacgctcaatggccagaatcaaccgatctgcaccttcctcgccaagggcccgccgtcctcgaccgtgacccaggaaggcctggcgatcctgatggaggtgatcgccttcgcctcctaccccacgcgcttgcgcaagctgaccaaccgcacccgtgccatccacatggccgaagaaggcgcggactttctcgacgtgttcgccttcttcggtgacgagggctacagcgaggacgagtgctacagcaacgccagccgggtcttccgcggctcgttgccgcgcgggctgcccttcaccaaggacctgtcctacctgaagggcttcatcatggtctacaactacattcagctggccgtacgcaagggcaagctggagcagatcccgctgttgttctgcggcaagaccacgctggaagacatgcgcaccctgcgccagctggtcgaggagggcatggtggcgccgcccaagtacctgccgcagcagttccaggatttgaacgcgctgtcggcgtggatgtgcttctccaacttcctcaaccacctgagcctggatcgcatcgaagccgactacgccaacatcatctgatcggcgcccacgaaaaagccggagcctaggctccggctttttcgttgtggcgcggcaatcagaacagcgtgcgcggcaggtaggtggcgatctcggggaacagcatgatgatgcccatgccgatgatgttgacgatgacgaacgggattaccgaccagtagatgtccttcatggtgatgccgggcgggacgatgcctttgaggtagaacagattgaacccgaacggcggcgtcatgtagccgatttccatgttgatcacgaacagcacgccgaaccagatcgggtcgaagccgagcgaggtgatgatcggcaggaataccggcagggtgatcagcatgatgccgaccggatcgagcagcatgcccatgacgaacacgatggccatcatgaagatgacaatggcccagcggccaccgggcaggtccatcatcagcccttcgatcagcgactgcgcgcccatgccctgataggccgagctgaacgcgtgggccgcgaacaggatccaggcgatcatgccggtcagcttgaacgtgcggatggctgcttcctgcaggatcggccagttcagcttgcggtacacggccgccgagatcagcgccccgaatacgcccatggcggcggcttcggtgggtgtcgtcaggccaccgatgatcgagccgagcaccatcaccacgatgccgatcggcagcagcacggcgcgtatcgcacgtattttttcgccccagctgccgcgctcttccttcggcagagccggcgccagatgcggctgaaggtaggcgcgcaccagcacgtaggtaaccgtcagcgcgaccagtaacaggccgggcagtacgccggcggcaaacatcttgccgaccgactggccgctgatcatggcgtagagaatcatcatgatgctcggcgggatcaggatgccccagccaccgccggtattgatgcagccaaggaccatgcgcttgtcgtagccgcgttcgagcatcgccggcagagcgatggtgcccatcgcgaccaccgcggcgccgctgatgccgaccatggcgccgaataccgcgcagatccccagcgtgccgatcgccaggccgccacgcatgccgccgcaccacaggtgcatcatgcggtagaggtcgcgcgcgaccccggtgcgttcgaggagcatggccatgaacacgaacaatggaatggccaccagggtgaagctttccatggtgccccacatctgcgaagcgaccatgtaaaaggcatcgacgccccaggtgaaatagaggaacagcaccgatacaccgcccagtacgaaggccaggggtaagccgagtaccagaaagaaaaccagcgtcaggaagaacagcagcgtggtgacttcgatgctcattgggcatcctccgcgtgctcggcattgttggcaggcacgcggcccagcgcgattaggatgtcctgcagcaatttggcgatgccttgcagcaacagcagcagggtgcccagcggaatcattgccttgatcggccagatcggcgggttccaggcggagtaggaggtttccatgccctgaaccgattcccaggccatggagctgccgaagtacagcagcgcggccatgaacaggaaaaacatgctcgaggtgaagatgtcgacccaggcccgggcacgcgggctgaaggtcgaatacagcaagtcgacgttgacgtggtcgcggtgcgccatgacgtagccgccggacagcaccacgtaggcgccgaacagcatctgaccgagttcgttggtccaggacgtcgggctcgagaacaggtagcgcatgaacacttcgagcagcaacagcacgaagatcaggaagatcaggtaggccacccagcgcccgatgaattcattgagccgggtgatgccgttgatgtaggcatgaatcgcacgcatgacgagccccacgagcaagggttgagcggatcgactgctcggcgcggtcgatcgcgccgagcaggctaggggcgtcagaggtaaccgagttcgccaaggaaagacttgagcttcttcagggcctcggcagccttgtcgctacgctggccttcttcttcccaggttttctgcgcgacctctcgcaggcgtttctggacatcgtcggggagcgtgttgacctgcacgccttgctcggccatgaccttacgcagcgtgacctgctcctgatagaggtactcgttggtgcgataccagaactgctcgtcgaggacctgcttgacgatttcctggtcgcgctcggacagcttttccagcgccttctggttgatgatgatcacatcggtaccggcgatgttcagtgcgggcctcacatggaacttggctacttcgtagaagctcatgctcgccgcaccctgcacagcgccccagtgagcgccgtcgacgacgccggtgtcgagtgccggatagagttcgccacctggcaggtaggtcgtcgacgcgcctgcttcatcgaggaatttctgcaacgcgccggacgatcggatcttcagcttggtgaagtcttcccagctgttgatcggcttcttcaccaccatctcggtggggtagaccttgtctgtcgaccagtagacgccgtattgcgcggcctcgtcgcgcagcatgtcttcgaagcccatgtgcttatggaagtaggacgcctcccagacgttctggaaagcgaaaggcagacccgaggcgatgccggcaagggtcatcttgtcctgcgcatagccaggggaaatcgtgcccatctgaatgatgccgcggctgaccgcgttgaaggtttcctgcggcttgaacagcgcgcctgactcgaacagttgcagctccaggcggccttcggtgcgctgctcgatctggtttttcagacggacaaggctgtctttgtatgagctgctggcgctcggccagtgcgattgcacgcgccatttcgtgacgtcggtagcagtcgccatctgtggcagcactgcagaaaccgccagggcgacgaggctggccggaacgagcagcttcttgagcgtgagtttcatatcgcgtcctcttcttgtaattgtctggctgaagccttttgtgtcgcgcttgcattgctatgtttcgcagagcaaaactgttttctgcaaagctgcctgaaaactaccatagcggacgctattttcaaccactagcagaaggctatcgcgccgtcatggatgtttcgcggtgtgtcggatcgcgccacgggcctaagggctcgcatgccgacattgatcttagacggttctgtttgtgggtcgtcataattctgcctgatggaacttaatttcgaattgacgcatcgtttcggccatgccagcttcaaaagaagtggactcagcacaataacaatcgagaggacaggccatgcgtcttcaccccggaaacgtcacgatcgaagcgcgcacccgggcggcggctaccgctggccctagggccgcgcaatgaccgactcgcagcagcagcgccttacagatgggcatcagcccggcccattgcccatcagtgggggcaaggacttgccaggttttcaccaggtcctcggttatcgccaggtggcctggagtgaggacgaagcggtgatcgagctggaggtgcagccctgtcacctcaacatggctggcgtgctccatggcggagtgatcacagcgttactcgacgtggtgctggccgaggcggggacctattgcccctatccgggacgggtgcgcaaagccgtcacgctggtgctcaacaccacgttcaccggccaatgctcgggtggcgtgattcgcgccatcggccgacgacgcgccggcggtagccgaatcttcaacagctccggagagatacgcgacagccaggaccgcctgctggcaatcggtgaagcgacctttcgcctgcgctccggcagcgaagatcctcagggcgtgcctgtggatttcccgatgcagcacaacaagaaggaaaacggcgatgtatgaactgaccggcaaggcgctggaactccagcagcaactcacggcgttcatggacgagcatatctacccgaacgaacacatctttcacgagcagatcgccaccgccagcaatcgctgggcgccgccgccgatcctcgaaacgctcaaggccaaggcccgggcgcagggcctgtggaacctttttttgccggaaagcgaacacggcgccggactgaccaacttcgaatacgcgcacctctgcgaaatcatgggccgctcccatgtcgcggccgaagtcttcaactgctccgcgccggacaccggcaacatggaggtgctggcgcgctacggcacgccagagcaacaggaacagtggctcaagccgttgctcgccggtgagattcgttcctgcttctccatgaccgagcccgaggtggcctcttcggacgccaccaacattgcctgcgagatccgccgcgaaggcgacgaatatgtgatcaacgggcagaagtggtggtcgtcgggtgcaatgaccaccacctgcaagatcgccatcgtcatgggcaagaccgatccctcggccgagcggcaccggcaacagtcgatgatcctcgtgccgctcgatacgccgggtgtcgagatcgtccgtgcgctcaacgtgttcggctacgaccacgcgccccatgggcatgccgaaattcactacaacaacgtccgcgtgccggccagcaacatgctgctgggtgaaggccgcggcttcgagattgcccagggccgtcttggccccggccgtattcaccactgcatgcgcaccatcggggtggccgagcgcgcgctgcaggccatgtgcgagcgcgtccatgagcgggtggcgttcggcaagccgctggccgacttcgactcgatccgcaaggacatcgcctgctcgcgcatcgagatcgagcagacccgcctgctgacgctcaaggcggcgcgcatgatggataccgtcggcaacaaggtagcgcgccaggagatcgccatgatcaaggctgccgcaccgagcatggcgctgcgcgtactggaccgggccatccaggtccatggcgccaagggcgtttcccaggacagtttcctcgcggctgcctgggcccaccagagaacgctgcgtctggccgacggccctgacgaagtgcacctggacaccatcgccaagctggagctgaagaactacgtcagcacgcgctgagcctccaacaaaaccaacaaaaggatgccgtccgatgaccaatccattattcgacctgtccggcaaagtggcgctgatcaccggttcgacccgcggtatcggtcgctccattgccgaagagatggcccgctgcggcgcgaaagtcgtcatttccagccgcaaggccgatgcttgcgaggcggttgccgccgagctgaaagccgccggcttcgaggccattgcggtgccttgtcatgtcgggcgcaaggaagacctgcagcggctggtcgataccaccttgcaaacctgggggcgcatcgacgtgctggtctgcaatgccgctaccaacccggtctacgggccgaccagcgagctgaccgacgacgcctgggacaaaatcatggacaccaacgtcaagggcaccttctggctatcgaacatggtgctgccgcagatggccgagcgcggcgagggcgcggtgatcatgctctccagcatcgccgggctgcgcggcaacaccgtgatcggcacctatggcgtatccaaggccgccgaagcggcgctggcgcgcaatctggcagcggagtgggggcccaagggcatccgcgtcaacgccatcgcgccggggctggtgcgtaccgatttcgccaaggcgctgctcgacgatccggagcgggttcgccgcgccgccgagaaaaccccgctgcgccgtatcggtgagccggtggatatcgccggtctggctgtgttcctggctgcgccagccagtgcctatatcaccgggcaggtgatcgtcgccgatggcggcgaaaccgcgtgctgagggttcgccgatgaacgaacccgagctgatcgacgtgcttcccgcgcatcgattcgatgaggcggcgctggctcgatatctgcgcaagcatctgccgcagatgggtgatgacgttgtgatccgtcagttccagggcggccagtccaaccccacctatctgctggaaagcgccggacgccgttacgtgctgcgcaagaaaccgcccggcaaggtgctgccctcggcgcacatggtcgagcgcgaatacaaggtgatccgcgcgctgtccgagcacacccgggtgccggtgccgcatgtgcatctgctgtgcgaagacgaaagcatcatcggcactgcgttctacctgatggatcatgtcgagggacagatcttcagccatccggcgctcgacggattggccgttggccagcgccagccgatccatatggccgccatcgatacgctggccgagctgcacaaggttgacgtcgaggcggtggggctcgccgatttcggcaaggcgcaaggctatttcgctcgccaggtgaaacgctggtccggccagtacgaggcctcgcgcaccgacgacatgccggcgatggagcggctgatgcagtggttgccggagcaggtgccacagcgcgacgaatgcgccatcgcgcacggcgactaccgcctcggcaacctgatcttcgcgccgggggaggcgagagtcgcggcgattctcgactgggagctttccaccctcggccatcccctggcggacctggcctacttctgcctgccgtatcacctgccggccggtgtcgacggtctgcgtggcttggtgggtatcgatctgcaggcgcagggcattccgtccgaacaagaagtgttggcgcgctattgccagcagagcgggcgcgatgccatcggcgactggcatgttttcgtggcgttttcgctgttccgtctcgccgcgattctgcagggtgtctatgcacgagcgctgcagggcaacgccagcaatgccgatgcgctacaggtcggccaacgcgccggcctgctggccgaggccggctggcgcatcgcccagactggcggtaagggagaaccaatatgagcgcacccttgctgcgccgcgtcctgctgaccaacgatgatggcatcgccgcgccggggcttgcccttctagagcaaattgccgcgcaactggccgaggaggtctgggtggtggcgcccgagcacgatcagagcggcaccggccaaggcatttccgtgcattcgccactgcgggcatatcgccacggtgagcgacgcttcgccatttccgggacaccgtcggattgcgtgatgttcgccatggccgagtggttgcgggatgcgccgcctgacctggtgctatccggcgttaacagcggcgccaatatcggcgactcggtgccttattcagggaccttaggggcggtgctcagcgccgacctgctcgggctgcccgccatcggtctgagccaggcctttctcgatcgcacgcatatcgattggtcctgcgtcgaaaccttcgctgaaaccacgatccgcacgctctgggcgcgtcgggagaagggcggttgttgctggaatctgaacttcccggcctgcccggccgatgccgtcagccatctgcgcatgacgcggcaatcacgcggctcgattgtccggccgcgcttgcaggccggccatgacggtcgcggtctgccgtactggtggctcggcttcgagcactcatcgacgcacatcgtcgatccggcattcgatgtcaccgcgttgcgcgaaaaacgcattgccatcacacccttgcgcgacacccggggctggctcgagtggggcgaagagcgggccatggccgaactggcctctactatggattcaggagttctgtaatgttcactcgtcatcacgccgtctggcccgaggacctgcccaaacacctgacggtgccggaaaccagcctgttcgccaacctcgagatcgccgcccggcgcttcccggacaagacggccatcgtctattacgacaccctgatcaactacaccgaactgctgcgcgaagtcgaagcgttggccggttatctgcagcacctgggcgtcgccaagggcgatcgggtgctgctgtacatgcagaactcaccgcagttcaccatcgcttactacgccatcctgcgtgccgacgcggtagtggtgccggtcaacccgatgaaccacagcgccgagctggagcattacctgcacgatactggcgcaagcgtctgcatctgcggccaggaactgaccggcttcatctcgccactggtgagcacggcgcagctgcgccatgtgatcgtcgcggcttactcggagtatgttcgccagcccaccgacctggcgctaccggccgaggtccaggcgcctgtcgccgcgccgacgtttcctggcggcatcgcctggcgcgaagccatcgcggccggccacgagcccggtccgcataccgctggcccggacgacctctgcgtgttcccctacagctccggcaccactggcgcgccgaaaggctgcatgcacacccatcgctcggccatggcgaccatcatccatcgcgtggtctggaccaacagcaccagcgaatcggtgatcctcgcgacgctgccgtatttccacgtgaccggcatgcagggcgccatgagcgggccgatctacaacggtggcaccgccgtgatcatgacccgctgggaccgcaaggtcgccgcgcagctgatcgagcggcaccaggtcaccggctgggtcaatatcgccaccatggccatcgatttcctctccgatccggatctggaacgctacaacctgtccagcctggtcagcgtcggcggcggtggcgccgcgatgcccaaagcggtcgaggagaagctgcatcggttgaccggcctgcgctatatcgagggctacgggctttccgaaaccatcgccgccacgcatatcaacccggtgccgcgacccaaggcgcagtgcctcgggattccggtgttcgacgtcgacagccgtgtcatcgacctgaataccgggcaggagctcggtcccaacgaagtgggcgaaatcatcagccgcgggccgcagctgttccagggctactggaaccgcccggaagagaccgagcgcgccttcatcgaactggacggtcatcgatttttccgcaccggcgacatgggctactacgatgaggagggctatttcttcctcgtcgatcgggtcaaacggatgatcaatgcgtccggcttcaaggtctggccctcggaggtggaaagcctgatgtaccgccaccccgcgatccaggagtgctgcgtgatttcgcgccccgatcccaaacgtggcgagacggtcaaggcctgcgtagtgctgcgtgatggtcaggccgggcaggtcagcgagcaggacatcatcgactggtgcaaggccgagatggcggcctacaaggcgccggtctacgtggaattcgtcgcctcgttgccgcgttcctcaaccggcaagctgatgtggcgcgccctgcaggaagaagaaaaccgcaaacacgccgtcagcgccgaacaggcctgagggtcgggaagccattgcaaggccccgcgccggctggcgccttagaaaacggagcagatgctatgcaagattcaaccactacgaaccgggaagccgaatggcaggtgcgcaaggacctggcagcggcctatcgcctggtcgcgcatttcggctgggatgatttggtgttcacccatctgtccgcccgcgtgccggggcctgaacatcattttctgatcaacccatacgggctgttgtttcaggagatcaccgcctcgtcgctggtgaaggtcgaccaggaagggcagatcgtccagagcggcagcctgcatcgcgtgaacccggctggcttcaccattcacagcgccgtacacatggggcgcgaagatgccggtgcggtcatgcatcttcacgccgccgatggcgtggcggtatcggcacaccgcgacggccttttgccgcttagccagacggcgatgctctgcctcgatcacctctgctatcacgagtacgaaggcgtcgcgctggacctcagcgaacgcgagcggctgattcgcgatctcggcgacaagcgaatgatgatgctgcgcaaccacggcatcctgacggcgggcggcaccgtcgccgaagccttcacttacctctatttcctgatgaaggcctgtgaaattcaggtgcgcgctcaggcttgcggcccgacccacatgccgtcagcagctgcgatcgagacgacccgtcagcagtcggccgaactgggcagcgccgccaagctgacctggcccgccctgttgcgcctgttggaggccaacggccacgtctacgccatttagcgctaggctggcacgctcgcctgtctgtcggcaggcaacttttttcaaccgagcagaatcagagtacccatgaaaatcctcttcgtcgccgccgaccccaagcccgagcgctggaccgatctgatccagcagcacctgccggaggggcagattcaggtctggcacccggacatgccgagcagcggtgccgactacgccatcgtctggcatccgccggctgcgttgttcgacaaggagccgcaactcaaggcggtgttcaacctcggcgccggcgtggatgcattggtgcggataccgaacctgccgcgcgatatcccgatcgttcgcctggaagacgccggtatggcggtgcagatggccgagtacgtcgcctatcacgtcatcggcatcagccgcgacatggacgcctatcgcgagcagcaggccgctggccagtggaagctgcgccgtccgatcgcacgcaacgaatggccggttggcgtgctcgggttggggcagatcgggcagcgcgtcgcccgtacgctcgctgcgctggaataccccgtctgcggctgggcgcgatccggtcatacgatcgacggcgtgcgcagcttcgccggcgagacggaactcgaccgcttcctcggcgagacccgggtgctggtcaatacgctgccactgaccgacagcacgcgggacttgatcgactacgggctgctgtcgcggctcaggtccgatgcggtggtgatcaacgtcggccgcggtgagcatctggtggaccaagacctctgtcgcgccatcgacgagggtaaggtagcccgcgccgtgctcgacgtgttccgcgaagagccgctgcctaccgagcatccgttctggcagatgccgcaggtgaccatcacgccgcacgtgtcggcccgcaccctgcgcgaagcgaccgttgcccagatcgcggaaaagatcgtggcgctggaaaagggtcaatccatcagcggcgtcatcgatattcagcgcggctactgaatccggtagaaacaggcccgaacgaccggttgctagcacaagccaaaaacttcgccccggggcgggcctcccacaaagcagcgtgatgcgctcacgccctgtaggaggcgcgacccgcggcgaatgcaggccgcaggcctgcccaaacgctcaaggctcatgtcgcgctgtagaccggcccatagtcggttcgcgttcgaaagccaaaagccccgtccggggtggggccccaaaaaaaaaagcagtgagatgcgcgcacgccctgtgggaggcgcgcccccgcggcgaatgcaggctgcaggcctgccaagcgctcaaggctcatgtcgtgctgaagaacggcccatggtcgcttcgcattcgaaagccaaaaacttcgccccggggtcggggctcccacggctaagcgaccaatcgcactcggctgctgtgggagccgcgcccccgcggcgaatgcgggctgcaagccttcccagcgagagagccaacgcttcgtcccggagcgggcttctgccgcctttaacagtcatcccgtttggctggtggtcaccaggtgcagaaaacatgtagcggctctgtaagaactggcgctacttgctgcaggccatacgccgaggcccataccaagctgcgcaacttattgcgcagcttggttttttaccgcgaaccagaccataaaaccgctctattcaattgcacccgccaggcggtttgtcgcaaggttgagcggcgaggcaaaggctcaacctctcgggttgaagggacacaacaagcgcaggcaatgaacgccggcgttaccaaggaaaaggactttaggtgagtggcgatgacgagcaacgttaaccattggagctatccctttgccggcgacgcaggcaatccgttagcaaacctgaccagcctggccaaggccaggggcggctactacccgatgggcgccaacggcctgtggcatggcggcgtgcacttcgaccaaggcaccgccggtaccttcgatcagtccagcgtgcgttgcattgccgatggcgaggtgattgcctaccgcatcgacgagcaatatccgataagcgagtacatcggcgagattccgctgatcaagcgcgcgcttttttccaccgggttcgtgttggtcaggcatcggctggcgctcccgccattgcaccctacgcccggatcggacgcgtcagagccggccttgacgttctatagcctctatatgcatctgcaggactgggccggataccaagcccaagcgagcctgccacgccctgacttctggggcgaagggacctattgcgtcgaaacacagggctcggacctcaatgtccgtgcagagcccagccagagtgccagcatattggccgctttacccaagggaacacgggtcagggttggcgccagcaacggtcagtttcgcaagttgctgagcattgtcagcggcgcggcgcggcctgctctggcgcctgccgatggtgaaggggccttgccgggttacctggccttcaagttcctcaaggcacaaagcgaacccaaagccaaaggcagcgtcgtggtactggaccagcccgtgccgatcaaggccggcgaccttatcggccacctcggccgctatcagaaccacgacgaagccatgcctcaaccgctgctggatctggaggtgttcagttgcgatgatgtgcctgcattttttgcccagagccgggcttatgcctctcgcctgccggagacgcagaaaaccctgctgaaggtctacaaaggcgccagcaaactgattccgcatcgcgagggcatcgatgccgacaatccccccaggctcggcgacgagggcgtgatggtcggcgtcgacctcgtgctgccgcagagcctgctcgacagcctgccggcagacgccaagctggcggtgccggccagcactggcggcatgtcatgcagccccgaaacccgctggtggcgtctcgataacctgctggtcgacaaggacggccagccgatcagcggctggttggccgaacagaaaatgatcaccactcgccacagcccttgggagtgggaaggctacgacttcatcgaagaccgcgaacgcccggccggcgccctggcgtatcacctcgaagccctgcgccggctgaccgacagcgaacgtgccagctacaagggcatgatcgaccaatccgacaagggcccggtcaagcaacgcctatatgccatcctcgacggtaacggcgaccaaaaaatcactccagaggaaatcagcactgctctgagcaagccctggcacgcccaatccatcgcacagctgatcaccaaacatgaaagcgaatggctctggaacccggacaagtgggacgagctggacgaactaatggaacacagccccgccgacccaaacccggactgggctgaggagaagaagcgaatcgagaaactgtcgtggtggaaggagttgggcgggaagcatggaataaatgcggatggggtggtttggcattttcagccaataggtttgcttggagcccatgtattaaagcagaaggcaactatcaataaaggtctaattacattcgacgccgaaggtaatgacactcctagctcaccatactttagccggaacattcattggccaggtactgagctttcaggcgtcaccttgggtcgtggttatgatatgggctcaagaagcgagtctgagatatataaccacatgcttgcggcaggcgttgatgcaatgcaagcctcaaaaatatctaaagcaaatggactgaaaggcaataaggcacagcaatttttggtcgtgaacaaagagactataggaacaatcagccgcgaccagcagatcgagctatttaacttgatctatcctgcttatgtaagcagggctatagtcaattacaatagttggaccgctgaagagtcagggagaacagagtggtctgaacttcagcaggtcataaaggatgtgttggtggatttcgtttatcaagggttcactaaggggccaaaccccatgaaagctggaatgcataataacgtaaatgaactgattagctacatcgagaacacgcctgcaatcagtcaatatgaaagtggcaggcacagagcagactacttgagaaataataaataagggtgctagatgaaatatttttaccctcttgcaatggttgccactttattggtcgcatcggtaaccagttacgctgccgaccctggcaacaatttctgtaaagaggttgtggatagtcaaaaagtttttgattgctccgtgtatgagaaagcgagagcggataaggagttgaataatcagtatcgcaacctgttggaaagagttagcagccaatacaagtcaaatcggatgttgggcgacgactacatccagagaataaaaagctctcagcgcctatggattaaattgcgagatgctgactgcacgttggaagcatttcagatagaggctggtactctagcttatgagaccacaatgaactattgcgtagtgcggatgagcgacaagcgttcaaggtatttagagcgcatcgcgccaaacctataacgggtgccgctactagtgattagttcgatgagaatctcgacggcaaaataggtggccgcggataaagcaatgaaagtacatgcaatcatactcagtatgctaataacagctagtcatgttggcttggcagaagaagtctcgataagcgaaataagatactacaacggaaccatcgcaagccaagaaatcgccatgagtcttgagtttatcggcaataatgttgctggcaagtatatttataaaaaatataaaaaacctatagatgtaacaggggggtataaaggaaagattcttaatcttgtcgagcttcatgatggagttgcagttgcgaatattcatgccgtaaaaaacgatgcagcacttgaaggtgcttggcaagataagaaaacatatccttttcatgtcaagtctacatcgaagtcatacaaggatttaataaaagctatagctccaagtgagaaaggcataaccatttattttaaaaatggattaaatcaagagatcaatgcgggtacgctcaccgattctctttcaattacattcgaagactttacgtttgacggctatcccgatattaggattctagaattagagggtggcgggaacagttcgtatatttactatgagtatgatccaggcacgcttaagtacattaagtcagcgccggaaatcaatggccttgtaaatcctctagtcattcatggcaagaagctacttgctggattcataaaggatggatgttgcggttattcggtggtcacgatagatgagcatcagatacgcagggctgagtataattacgtgcagggtacgggaaaagaaagaattaccgataaattatccaagaaagtggtagagaggcctatcagtaaggagaaatttgaagtcgactacttctcattcgttcagaaaggaagccttcaatagactagaagtacagcaaaccgctcggggtggacgtcgttgtcatgcaccgggtcgacttcacagctatcagcatgatctcagccgggccaagacgtctgctagcaacgcaacggctttcgcctgcagctcaagcaacttgaggccgagctgcaagacccaacccgatgctggataaggccgctgactgccttagccaccaagacgtgccaatacctcgggtattcccttcaagcggccgtgccgtgcttcgtcaggtatcgatcccgcagctcgcgcttgagcaccttgccgatggcgctgcgcggcagctcgtctgtcagttccagactggccaggcgctgggtcttgccgacgcgaccgttgaaccagtccagcagcgcctcgggcgtgtccgtcgcgccgggagcgagcacgatgaaggccaccggtgtctcgccccagcgcgtcgatgggatgccgacgacagccacatcggcgatggccgggtgttgtcggaggatggcttccaggtcgctcggatagaggttgaagccaccggaaatgatcatgtccttcttgcggtcgagcagggtgagaaagccctgctcatcgaagcggccgacatcgccggtgcggatgaagcgcttgccgctggggtcgaaccattcggcttcggcggttttctccggtttgttcaggtagccggtcatcatggcgggagagtgcccgacgatctcgccgatcgcaccttcgggcaattcgctgccctcgtcgtcgatgacgcggatgtcgtgcccctcggcgggcttgcctaccgtatgcagtttgtcggggtgttcgtgggcggccaggatgcaggttccgccgccttcggtcatgccataggtatcgatcaggccgcctggccagcgcgccagcacatcggctttgagcgccgcgctgaatggcgcgctggtgcagaacttgtaacgaaagtggctgaggtcgtactggtcgaagtcttcgcgcgccatgattcgctggtattgcaccggcaccagcatggtatgggtgacgccgtgctgctgggccaggcgcaggtactcgccggcttcgaacttgcccatcagtaccacggtgctgcccagggccagcgtcggcaggaaggcaaccaatgtagtgttggagtacagcggcgtggagatcagcgtgatggcgtcgtcgtaaccgtaggcggcgctgcgacgcacgtgggcccagcgcatggcatgggactgcacgatgcccttgggttcacccgtggtgcctgaggaatagatgatgttgaacgcccagtccggctggatcgccaccggtgcaaccgctgcgtcttcgagccattccgatagtgtgcccgcgccggtctgatccaagctcagagacgggcagggcagccgcgccatcgccgatgacaaatgctgggccgctggcgcatcgaggaatatcaagcggggcgaagcatcgtccagcatggtcagcaggctttcggcgctggccgaaggcgccaggggagcgaccgctacgccagcgcgcagggcgccgagaaacaccacggcgtattcgatggagttgaatgcgcagatcgcgacgctactcccaggtgcgatgccgtcgcgctgcaaagcggcggcgacacggttcatccgctcgttcagttgggcgaagctcaggcggcgcgcatcctgaatcagggcggggtgatccgggcgctgcgtcgcccagtgctcgatgagctcgggcaccgtggcgaaaggccggtcgaggctaatggtatcggcggaaatatccatggctggctcgtcctgtcgtttgatttatcgcgatgccgtgcggcgcaatcgcaccgaaatgacccaaccatcggcgctaatcaggcgccggtgaagtgttattcgcgtcgtcgatgcctggcgatcaatgcaaaccagtctggctggcaggctgccagctgctcccgggacccgaccgtcccctgcggtgctgccagtgccttggatggggcgcgtgcccttcgcctgcggggctcgttttttgcgacaatgcgggctctttgatcaggcgagtccgtcatgtccgaacgcaatcccatcccgctgatcctgaccgccatcggcagcgtcatcggcactgtagcggtgctctcctactatggctacgtgcacgtcgccaagcctgaagatgcgctgttactggccgactacaccatgctcaagaccattcctggcgaggattatcgtgtttcgctgaccccggcgccgcaggttgcccagtgcatcgatggtgtgctggtgctgttcgacaccgagcagaagggattgacgggcgtgctggtcgacagccacaagcgggccatacgctgcgtggatcaatccgcgccggctgccacgcagccaccggccaagccttgagaccaaggcccgtctagggcagctttggtcctgataaaaaagcccgccatgatcagctctgatcatggcgggccttttcgctacggctgaacggccgtcactattccatcgacgagcgcggcgctacgcgcttgttatcgttggagatcgttacttcgacgcggcgattcatcgcacggctggccggcgtgtcgttgctggccaccggatactcctcgccataaccgaccgtctggatacgctgcgcatccacacccgcgcgggtcagggcacgcatgaccgattgggcccggcgctcggacagctgctgattgtaggacgccgaaccggtgctatcggtgtagccctcgaccaccaccttgcgctccgggttgtcgttcaggaactccgcgagtttctgtacgccgcgcatgccggccggcttgagctcagccttgttgagatcgaacagcacgtcaccgaaggtgaccagcgtgccgcgttcggtctgtttggcttgcaggtcttgctgcagcttgcggatctcgtcctgctggcgcttgagctgctgctcgcgggattcgagcctggcctcggcgcgcttggccgaggccttctcgatgtcctgctcggcggtacgcagcgcgatggtctgctcggcgagctcgatgcgacgtttggccagataggaaagctgatcgaccttctcttcatccgcgtcgttcaggtaggcctggttggccttctccagcatcttgccggcgtcttcggtttccagtgccgccagctggttagagcggggatcggcctgcagctgggaatattgcccgcgcgcctgctcgagattctggttgggttgggaagagcaggctgccagcccgattgtcatggccagcacggtagggagtgtcagtaatttattcataaccaatcatcctgtgttgaaagcatcgagaattgaacgtggtgatcactggaggccgcgcatgctttcttcgcgcagttcctggatccccttgttggcgtcctctacggccttctgcgccttggcggcctgagccttgcgctcggcgacgcgtgcgtcccattcggcttgttcggccagcttgcgggcctcgtcgtagttctccttctgcatggccagctcggcctgcttccatttttcctgggcggcgcgcatttcgaccgctgcgtattcggtaccgcctgcgctgaccgcgctacgtactgccgattcggtgacggcaaactgttcgttcggtggattgccggcacaacccaccagcagcagacctcccagcgcaacggccgtcagcttcggtaactgaaatcgcgatagtgggcgctcgatggtgttcgttttcatagccagtctccagtggaagatcgggaacagtgcccgtaagccgcgtgcctagccctcgatagggagctgacaatcagaacgggcatgtttttgtgagggcatcgggccgcaatcgttccagcggaaggacaaacgaagcgtgtggagatggccgtttagagctgtcggccgagcgcaagaggccgtttggggcggcctcgccgaggggtacgaccgtgccgaggagcggctcagccgtaccatgcgggagtcatggctgtgtggattgctccgccagcagacgctccagatgcttgcgagatagcgcgaggaaacgcggcgtgggaccgatgtcctcatagatcgggtcgccttgctcatcggtggcgatcaccttggtgcccttctggtaggggaggctggtctcgatgccctccagcgcggcgccgaccagttcgccgagcaactcctcggtgctacgcttgggatacatctccgccagcgcggccagccgtgcggcgctttcgacgtccagtggaatggtgtaccgagtggcgctcatgcgcccggtggcgctgctttcccattcacgaaccagttctgaaatcttcatcgagctccttccttagcccgccgtagcggacggtagtggcgagtatgcgagcgaccgtcgaacagacttgccgcgctatgtcttgtcttcaacgaacgcgctgggcactctgtttggagggttcttacagcgtagccgttcagcatcggttgcatatccattgcgagccgttggtggcgcgtccgggaggcaggaacatggcgaagatcgacgcgcgtctgcgcgaaaacgtacatctgctcggggaactgctgggcaacaccatccgcgagcaacacggtgaagcctttctcgacaagatcgagcgcatccgcaagggcgcaaagggcgctcgtcgtgggtcggccgatggtgccaggttgcttcaggaaaccctcgacgggctggctgacgatgaactgctgccgatgacgcgcgccttcaaccagttcctcaacctggccaatatcgccgagcagtatcaccagatacgccgacgccgccccggtgagccggcacagtccgaaaccggtgtactgggtgggttgctcgaacgcctcaaaggcgagggcttcggccaggagttcctcgcccgacaagtgggtcgactggacatcgagctggtgctgaccgcacatccgaccgaagtatcgcggcgcacgctgatccagaagtacgacgccatcgccgcgcaactggcggcgcgtgaccacaccgaccttggcgcggcggaactggcgcggatcgaactgcagctgcagcggttgatcgccgaggcctggcacaccgaggaaattcgtcgtaatcgcccgacaccggtggaggaggccaagtggggcttcgcggtgatcgagaattcgctttggcaggcgctgccgaacgtgctgaggcaggccgaccaggcgctccgtctcagcaccggtctgcgcttgccgctggacgcggcgccgattcgcttcgcctcgtggatgggtggcgatcgtgacggcaaccccaacgtcaccgcaaaggtgtcccgcgaagtcctgttgctggcgcgctgggtggcggctgatctgttcctgcgcgatgtcgaagggctgatcaccgcgctgtcgatgcagaccgccagcgacgatctgttacgccacaccggcgagtcggccgaaccctaccgggccctgctcaagaatctacgagagcgtctccaggcgacgcgtgactgggccagcgcggcggtcgaacgcgatcagtcggcgccgcctgcggtgctgcaggacaatcgtgagctgcgtgaaccgctggagctctgctaccgctccctgcatgcgtgcgggatgggtgtgatcgccgatggcgccttgctcgacagcctgcgccgggtcgccgcattcggtctgtttctcgtgcgcctcgacattcgccaggattcgacccggcacgtcgcggcgatggaggaaatcaccgactacctgggcatcggccactacgagcagtgggacgagcagcagcgcctcgagttcctgcagcgcgagctaagcaatcgccgtcccttgctgccgccgcatttccagccttcggacgataccgccgaagtcctggcaacctgccgcgtggtggcgcaggcaccggaggcgtcgctcggctcctacgtgatctccatggccaggggcgcctcggacgtgctggcggtacagctgctgctgaaggaggcaggcctgcaacggccgatgcgcgtcgtgccgctgttcgagacattggatgacctcaacaacgccggccccaccatcgatcagctgctcggattgcccggctatcggcaacgcctgcatgggccgcaggaggtgatgatcggctattcggattcggccaaggacgccggcaccaccgctgcagcctgggcgcaataccgagcgcaggaaagcctcgtcgacatctgccgtgcgcatcaggtcgaactgctgctgttccatggccgtggcggcacggtaggtcgaggcggtgggccagctcatgcggcgatcctgtcgcagccaccggggtcggtggcggggcgtttccggactaccgagcagggcgagatgattcgcttcaagttcggcctgccagacatcgccgaacagaacctcagcctgtatctggcggcggtgctggaggcgaccttgctgcccccgccgatgcccgagccgcagtggcgcgagaccatggagcggttggccgaggagggcgtcaaggcctaccgcagcgtggtgcgcgacgatccgcagttcgtcgagtacttccgccaggccacgcctgaaggcgaactcgggcgcttgccgctgggcagccggccggcaaagcgccgtgctggaggcatcgaaagcttgcgcgccattccctggatcttcgcctggacccagacacgcctgatgttgcccgcctggctgggctgggagcaggcgctacaggcgtcgctgatgaggggagaggccgatcggttgaaggagatgcgcgagcgctggccgtttttcaccacgcgtatcgacatgctcgagatggtgctggccaaggccgatgcggatatcgccaagcgctacgacgagcgtttggtgagcgccgaactgcagccactgggatgcgatttgcgtgaccgattgtcgcaggctgtcaaggccgtgcttggcctgaccgggcagtccgagctgttggcgcacagtccggacacccttgaggcgttcagcctgcgcaacacctatctcgatcccctgcatcttatgcagaccgagttgttggctcgctcgcggcagcagtcgaatccagccgaaagccctctggagcaggccctgctggtcagcgtcgcgggtattgcggccgggctgcgcaacaccggctgagcgtgcaaaacgggccgatggcatgtgccgagattacgtcgccgccgctggtgggcgacgttttcccgcctcgtgggttgctgcgcaatgcccgcatcggcggccaaggagccggcttgtctgctttatgtgcgctgtgtatcgtgttcaaccttttgtcgcatggcggcaaaccagattttttgattcgccagcggtgaggggttgcagaccaacgatcctggcgacatccctttgcaaaccttgaggactcactccatgcgcgtaattctgctgggagcgcccggtgccgggaaaggcacacaggctcgcttcatcaccgagaagttcgccattccgcaaatctccacgggcgacatgttgcgtgcagcggtcaaggccggctcgccgctgggcctgcaggtcaaggacgtcatggacagcggtggcctggtttccgatgaaatcatcatcgcgctgatccaggagcgtctgcagcagcccgattgcgccaacggtttcctcttcgatggcttcccgcgcaccattccccaggccgaagccctgcgtgatgctggcgttcacctggaccacgtactggaaatcgcggtagacgacgaggaaatcgtcggtcgcctgtcgggccgtcgcgtgcatcctgcctccggtcgtgtctaccacaccgagcacaacccgccgaaggtcgccggagtcgacgacctgaccggtgaagagctgattcagcgcaaggacgacctggaagaaaccgttcgccatcgcttgagcgtctatcactcgcagaccaagccgctggtggccttctaccagaacctcgaaacgaccgaaggcacgcccaagtgcagccgcgtcgaaggcgtcggctcggtggaagagatcaccgccaaggtgatggctgcactcagctaaacctttactgcgctgacaaacaacggcccgcctagcgggccgttgtcgtttcaggtcggggcggtcgaggcagataagcaagggtcgttcttggagcagcattccttctcgggtgcgctagcgttggtcgcctggtctataccaggttggcttattcctcaataaaggaacgcaggagagcgtatgagaacgatgcagacgtgggtcgtcgggctggccatgagcgtcgcggccctgggcgctagcgccgctaccgagcttaggcactggcccagcgaggcggcgacgcagatcgataacatgatcgcagccaacgccaacaagggcgcctatgcggtattcgacatggacaacaccagttatcagttcgatatcgaagaggccttgctgccttacctggaaatgaagggcgtgctaacccgtgacaccatggacccgtcgctcaaactgattccgttcaaggacagcgacggtttcaaggagagcctcaacagctattactaccgcctgtgcgagatcgacgacctggtttgctatccctgggtcgcgcagatcttttccggcctcacgctgcgccagctgaagggctatgtcgacgaggtcatggcctacgacaaaccggtgcccatcagctactacgatggcgacaaggtggtgcaaggcagcgtcacgtcgccgaagctcttcgccggcatgcaggagttgtataaccggctgcaggaaaacggcatcgaggtctatgtaatgaccgctgccagcgaagagatcgtgcgcatgatcgccagtgatcccaagtacggctacaacgtcaagccggagaacatcataggcgtgaacatgctgctcaaggatcccaagagcggcgccctgaccagctcgcgcctgcaaatcaaagcgggcagctacgatcctgcagccaacctcgacctgcaattgacgccgtttctgatgaaccccatgacctggtacgagggcaagttggcgacgatttatggctggatcgaccaatggaaaatgccggtgctggtggcaggcgacacgcctttgtccgatggctacatgctgttcaacgccaccgacatgggaaagggtgggttgcgcatctgggtcgatcgcaaagccaagtgcacccagcaaatcaaggactggcaagtcagtgcggccaaacgccaggcggagctgggccaggcggtgaccgccgataagaactggatcgtggtcaaacccgaccagattcattgatcggttgccgagcgctgcggcgttgggcagccgttccggaagcggccttgcatggggcgcttcccggttgctgacgctggcgctgttcctggcgacccatcgttgggcgggtcgcagcgctggcaaaaaaagacctaaaccgttttaatgcccgcccactcggcaacctgcataactcaccatgaccactctgctggcgctggataccgcgaccgaagcctgctccgttgcattgctgcatgacggcaaggtaatcagccactacgaagtgattccgcggctgcatgcgcaacggttgctgccgatgatccagaccctgctggccgaggcgggtatcgccctgtcggcggtcgatgcgctggcgttcggccgtgggcctggtgctttcaccggtgtacgtatcgccgtcggcgtggtgcagggcctggcgttcgcgctgcagcgtccggtgttgcctgtttctacgcttgccaccatcgcccagcgtgcgcaccgcgaacatggcgccgagcaggtcgcagcagccgtcgatgcacggatggatgaggtctactggggctgctatcgcctgaatcgaggcgagatgcagcttgccggcaccgaagccgtgctgccgccggagcaggtgagcctgccgcgcggggagggtggtcaatggttcggcgcaggcaccggttggggttacggtgcgcggctcgcggtgcagcctgccgcgatggatgcgggcctgctcccgcatgccgaggatttgctgacattggctggcttcgcctggcaacgcggggatgcggtggaggccgatcaggcccagccgatctacttgcgcgacaatgtcgcgacgccgaagcccgcgcggtgacaggcggcattgccaattggcgagcggctcgctagagtcggctccacttcgacaggtgaatgatgcgtctcaacggtctcgccccttctgcctaccccatcgaacgtgcaccccagcggggcggcgcgccggtaccctatcgcgagagcgaacgggcggcagagcaggcgcgcgaagcgatcgtcaccccggtcagccagaccgaattcacctatgaacacctctcccgacccacgcggagcgagtccgccgacgacgcgtcggttatttccggcgacttcatgccggcgcgcttcgaagccatgatggaacggccgcttaccagccgtgcatctcaggcgttgcagagttatggcagcaccgccagcttcacggccgacctcgatgcccacgaagtgctcggtctggatctgtatgcctgaggcatcgtgaaccgcgtttgaatcttccctattttctcggctgtccctcctggaacgatgctgcctggcgcggttcgctgtattcgcccggattgccggcgagcgagttccttgcacgttattgctcggtgttcaacagcgtcgagggcaacaccaccctttacgcctggccatcggcgcagaaggtccaacgctgggcggcagtgatgccggaagggtttcgcttctgcgccaagctgccacgcgagatcagccaggcgccggatttgcatgaagcaacggatctggtcctgtcattccgcgcgctgcttgcaccgctggggcagcgggtcagcccgttctggttgcagctgccggcgacctttggtccggctcgcctcggcgaactggtgcagctgatcgagacactgaacagacctttggcggtggaggtgcgtcacccggcgtttttcgccaggggcgaggaggagcgtgcgctgaaccgcttgttgcacgaacggggcgtcgagcgcatctgcatggacacccgcgcgctgttcagctgccggacacatgatcccgccgtgctccatgcacaaagcaagaagccgcgactgccggtgcgtccggcggcgttcagcgagtctccgcagctgcgcttcgtcgggcatcccgagcttgcggcgaacgaccgctttctcgggccgtggctggacaaggtggcgggctggatcgaggcgggcaaacggccgcatgtctatctgcatacgcccgacaaccggctcgcgccggatctggccatgcgctttcatgagcagctcggcgaacgattgcccggcctgccgccgctggccgtggcgccgatgcagagcgagtcgcagctgtccttgctgggtgcagagcgctgctcgtgatgcgccgttagccggaatcgctgcaaccttggcgtgtcggtgttgccaaaatcggcatgactttcggccgcttcctcctgttgctactgctcgcgttgggtggattcgtctacgcggtatggcgcggccacgtcgacgtcccgccgaaatggaacccctgggcgccgctgaatatccgcgaagcgccgaatctgctgacgtccttcaaactgcggcgtttgcaggaggatcgcgggctgtgcgaacaggcgctggctacctcggatttgaagtacgtagcggtgccggacagcacgccgcagcccggctgtccggtggagaacgccgtgcgcgtgaccggttcggcggtgcgcttcaacggcccattcctggcgacctgtccgctggccgcggcctatgccttgttcgaacgacacggcctgcagcctgccgctcaacaggtgttcggccagccggtggtgcgcgtcgatcacttcggcagcttcgcctgccgcaatatcgcgcgcagtaaccggcgcagccagcatgcgacggccaatgcattggatttggccgggttcaggctgcgggacggtacgcgtatcaccgtggcgcgcgactggacgggcgatggcgacaaagcgcgcttcctccgcgaggtcaaggcggccgcctgcgatgccttcaagatcactctgagccccgaatacaacgccgcccaccacgatcacttccatgtcgacatgggtggcttcggcatgtgccgctgaggcaagccggccgtgcctctggcagaatgcggcgttttccgtcacgagctccgtatgactacctctctcccgttggtccgtgccgaagcccttgcgccccagttcgccgagaagaccgctgcctgggcgtcgcggctgggcttgccgcagcaagcggagggggccgagttcgcgttgcaactgggcgagaacgggcttcagctgcagtggctcgggccacaggcacctgggccggtacgggtggatttcgtcgaaggcggagcggcgcatcggcgccagttcggcggtggcagcggacagatgatcgccaaggcggttggtatccagtccggcgtccgtccacgcgtgctggacgccacggccgggcttggccgcgatgctttcgtcctggcgacactgggttgcgacctggtgttgttcgagcgccaaccgctgattgccgcgttgttggaagacggcctggcgcgcgggcgtgaagacgccgaagtgcggcctatcgtcgagcgcatgcgtctgcagcagggcaatgccatcgagctgatggcgcggtggcagggcgaacccccacaggtgatctacctcgacccgatgtttccacaccgtgaaaagagcgcattggtgaaaaaggagatgcgtttgttccgccccttcgttggcgacgacctggacgccggtgtcttgctcgagcaggcactggcgctggccagccaccgcgtggtggtaaaacggccccgcaaggcgccggccatcgacggccccaagccgggttatggcctggaaggcaagtccagccgctacgacatctacccgaagaaaaagctgtccgtcgagatttgacggctggcgaagacgaatcgaatctgctggcgttcgatccgacgtgccgctgcccttgcttaatctcgccaacaatggcattcctagctcaggccgtttgtggtctgaacggtggttacctagatcgcgtagaaggaagagcatatgcagatccaagtacatagcgataaccacatcgaaggaagcgcccgtctcgtagactgggtcagcaacaatgtttccgacaagctcgaccggttcgacgacgaagtcacccgcgtcgtggtgcatctgagcgacgagaacggcatcaaggccggcgcccacgacaagcgatgccagatcgaggcccgccccaaggggcagcagcccgtctccgttacgcacaaggcagcatccctggaattggccgtggagggagccatcgacaagctcaacaacgccctcaagcatcagttcggcaagttgcgcagcaagcgtgcaaccgcgccgacgcctgtcgaaggcgagacgctcgaagtcgaaggcagagatgccttgctggaagaagatttcctcgctgacgagcaattgcgcgccttctgaattcctacgaatgggcctgccttgcaggcccaacctctccagggcgtctccggatgcctgtgccgcctaggcggaccatcaccggcaccaacgtgctccccgattcgccattgcgttgaccgaccaccggacctttgcctggctgctcgttgtgctataccccattggaggtactacgcgaggtgcgccgctgccggtgcgcttggctcgtagcgaactgcgaagagaaggggggcaattagccgcatgggtgcgcgtcgaagccacccagggctgtcagtagagagaggtgacaccatgaccatgatgcaatgtgaataccgcgatcacgtcattactgccgaagtaatggagcatcccggcacgccgacgccctgggctggcggttgccgaatcagcaatcctcaagggcaggtcactcggcggatggcgcttccggtcgggcacgcgttcatggcggagctcgagcaggcgcagcgagcttccattgcccacggcaagtggctcgtcgaccagtgcctcgatcagggccgtcagctgttcgacaaggccgcctgagccctctttggcgggtcgcgctccggcgaggcccgcttctttgcttctcgcgggtcaccgttggccagggcgtttcgttgaactgttggtcctccgacagcctctactgaaggcatcgcccgcacccgacgggcgctcgatcgaccaggacgaggagccgttcgatggaacttccaaacaaagacatgactacattgttcgagcagctgggtctgccctcggacccggccagcatcgatgacttcatcgccagccatgcgccgctgccgaaccacgtcaaactagccgaggcgcctttctggagcgatgcccagcgtgccttcctgcgtgatgagtggatagaggatgccgagtgggcgcccattgtcgacgagctcaacgtccgcctccacgaagagcagaaccagccctgacggccctggcctacagaccggtagtgactggtgcaggctatcggtccgatagcctttgcctacagaacccctgccggtcagtggcgcctaaagaactcccgcccagacagttccaggagccctcatgactgaagagcgaaacacactcacgacccggcagggccaccctgtcagcgacaaccagagtctacgcagcgtcggagagcgtggtccggcgacgctcgagaactaccagttcatcgaaaaaatcagccacttcgaccgcgagcggattcccgagcgcgtggtgcacgcgcgcggcactgccgcccatggctggttcgagtcgtacggcaagataggtgacgaacctgcgagcaagtacacccgggcgaaggtactgaccaacaccggtgtgcgcactccggtcttcctgcgcttttccacggtgatcggcggcaaggagtcgccagaaaccgcacgcgacccgcgcggcttcgccatcaagttctataccgaggacggcaactgggacctggtcggcaacaacctcaaggtttttttcatccgcgatgcgatcaagtttcccgacatgattcacgcgttcaagccggacccggtttccaatcgtcaggaagcctggcgcttctacgatttcgtccagcaccaccccgaagcgctgcatatggtcacctgggtcaagagcccgtggggcatcccggccgactatcggcacatgcagggttccagcgtgaatacctacaagctggtcaacgacaagggcgaagcggtgctgtgcaagttctccttcgagcccaagctcggcgtgaagaacctcacctcggagcaggctgctgaaatccaggccaaggacgtcggccacgccactcgcgacctctacgacgcgatcgagcgtggcgagtacccggagtgggaaatggccgtgcagatcatgtccgacgatccgcaccacgagctcgatttcgacccgttggacgacaccaaacgttggccagaagaccagttcccgctgttgccggtgggccgggtggtgctcgatcgcaacccctctaacgtctttgccgaaaccgagcaggcggccttcgggaccggcgtgctggtcgatggtatcgacttctccgacgacaagatgttgcagggcaggacgctttcctactccgacacccaacgttatcgcgtcggtgccaactacctgcagttgccgatcaatgcgccgaaaaagccggctgcgaccaaccagcgcgacggtgccatggcgcacttcgtcgacggtggaggtgaaaatccgcatgtcaactacgagcccagctcgatgggtggcctgaaagaagcaccgaagcctgcctacgagtaccaccagtttgttgaagggcatctcggccgctaccagaccactcggacggaagccgactaccgacagacgggtgaacgctatcgcagcttcgaggactgggagcgtgacgatctgatcgccaacatcaccgctgacctgaaggactgccccgaggacatctgcctgcggatgatctggcacttctggcattgcgatcccgattacggtcagcgactggcggacggcgtaggtgtcgatatcgagaaagccaaggcgctgccaccgctggagggccgcgcggcgccgggcgagaacccggcgggcccgacctacagcagcggcaaacctgaaggtcgcgacaagcacgacgaggcctgagggcgtactgccacgccgcggcgggatcccgtggcgtggcggttttgctcggtcgcacctgcgcggactgattagtgactggcagtcagaacaatggattgaaaatccatggctgtgacgtcggttggccgcggcatggcataggcctgaggcgatcgagtctctagaatccgctttatttgcgcgccggccgcgccctccagagaaggacccccatgacttcggaacccaccgcttcccacgtcgacatcgacgcacgctacgccagcgccaaggcccttgcgctcgaggccgccgagatgggcatgacgttctaccgcaagcgcgagtcgctgaccgtcgagcacaagggtgacgacctgcaggacgtggtcagcatcgccgacaaacagatcgaggcctttatccgcgaacggctgagccagcgctttcccgaggacggctttctcggcgaggagagcggctctgccgatctgagcgcgcgttgcgtctgggtcatcgacccgatcgatggcacagcctgcttcgtcaatgggctgcacaactggtgcgtatccatcggcctgctgatcgacggcgagccgcatctgggcgccattgccgacccgaaccatgacgagctgttccacggttgtctgggcaagggggcgttcgtcaacgacacgccgttgcgcgtcagcagcgcgacgcacgtggggcagggcgtgaccgccaccggcaccttccatcctcggggcaaggagcatttcattccgttcatggaaaagctgctggccgaaggcgggatgttcttccgtaacggctccggcgcgttgatgaccgcctacgtggcggccgggcggctgctcggctactacgagaccgaactgaagagctgggactgcatggccgggttggtgttgatcaaggaagcgggtggccgggtcaatgacttcttccgcaacgacggcttgctcaagggcaacccctatctcgtcgcatgcccgggtgtatacccgcagctggcggagatgatcgggacgtcgctggacgactgagcggttgatgatcgtcagctgatctcgcccagctagcggcacgctgatgtacctggatggcatgggcaggtagcgcgagacgtctccggcgcgacgccagcaagtcgggctcacagagccggtgcgtggcgcgctttgcagcaggcagctttcgatccgacgttgcgcggattccggaaatcaccaggcgtcttgagcaggctcgctcctacgggcatgcggtgattctgtaggagccagcgtgctggcgaactgcgccagccgggtaaaaaggcacccggctaagccaggctacttgtcaggtccgcagttcgggcggaacggtgccgccgtgctcggcgagcttgtgcatgacggtgcgatgcagccagacgttcatctgggccgagtcggccagcttgtcctgcgggcaacccagttcggtggccagttccttgcgtgactccaagctgctgtcgaggcccagcaatttgagcaggtcgacgatggaggtgcgccagttcagcttctctggatggtttgcggccatggcgtccagcttcgcgggtacatcgacggcagcggtcgtctggccagcttcgttgcttggcgcagcgccgggcggcgtcgtggtcgcattatgcgcggcggtcgggcgctccgaatcgatgaccgtgtccgtcgcatgctggttcggggtgttgttcgggtcgaccggcttgtgcgcctcgttgctgacgccacctaggcccagcttgtctttgatcttgtcgaacaggctcatttcgtgatcctcggttgatggggtccttgttggaccctcgctgcgctcggctcattccgtcccgcaggtcggaacctggcgcgtcgggggaccgtccgtctggctgcgctctggctgcgctctggccagcgtgcctcggcgagcggctgctcgctaaagcccggtctggctccgttcggttcgacagggcggcgatgccagctgacaggtgaagggtgcaacccacgcgggtgatctatcagccgttggccgtgtgcagcaccacgttctgtttcgcttgatcgggcagggcgacgccggcggcgcgtaacgccgcgactagcgccttgcgcacttccgaggcggtgaaaacgaagtccgaacgcctcgaatcgcaccagaactcgacatcgaacaccagctcggtcgagcccagctcgcgcagggttaccgatgcggagggggtgtccagtacgcccgggatatgctgtgcagcccggcacatgatcgggacgacggtgtcgatatccacttcgtagccgagcgcgcagacgaccttgccgcgccggatgggcgcggcggtattgttggttacgcgcgaagtgaaggtctcggcgttcgggaccagtacgcggcgaccgtcataggtgcggatctgggtggcgcgcagctcgatgcgctccacgctgccttcggtctcaccgatgatgatctgatcgcccagttcgaaggggcgcaaggtaagaatcagcagcccgctgacgaagttggagaggatatccttcagcgcgaagcccagcgcgaggctggtcaggcccaggccggtggcgagtgtgccgggctcaaccccgaaggcgctcgccgcgacgataagaccgagtaaccagacggtgtagtagctgacctggcggaccaggttttccacggtgcggtcgtcgcccaggcgattgaagagggtccgtaccagcgcccgcacgcccactgccaggccccagaacagcagcagcaccagcagcgcggcgagcactcgggggatgacctgcgtcgccgactcgagcaggcgggcaagggcggtctcgacgcccgcctgaatcgaggtgacgaagcgcccacgttcggagtcgcgacggtctgccgccgtcgtcagggcccgatcgatagatgccgcccactgcctcgccaggacgtcgaccgtaacgccgttggcttcggcatccatcggcgtcacctcgagcaaagtgcggccggctacgctgagctggcgattttcgccgtgctcgccgaccttctcgatgcgtgagcgggtaatgccctgaggggtttccagcacggcggccaactgacgttcgatctgccgcgccctgggcttggcctccagttcggcattggcaccgatgcgaaacagcgcgcggccatcgaggcgcaccgtagcaacgccttcctgcgcgaccgaagcaggcgccgccagcgcttggcacacgatcatcaatagcgtcagccagagagcgcgaaaacgtggtgagtcgatcaggtattcagacatggacggctgcggtcccaaggtgctgcccggtgggggaaacagacaggccgccgggaaaaacggcggcctgtcgatgaagcgcgttcctgagccgatgcttgtgcaatcggctagcggagcctggccctagaacaccagcatgaataaaccgatcaccaccaacagaccgatcagaaaaatgatgccgattgtgctgcccagaaacttcagcatgaggatgactccttttgcagtgggtacatcatttccgactggggaggcttctgatcgttcataaatgcggccggacggcgccggtgcagtcggcgaggcgtcagaggtgcttgtggatcagttgcaggccggcaacgagcatcccgacgcgggcgatgcggtagaaccaggcgtgatcgatgcgtttgtgcagccagagcccggcccagacgccgaaggggacgatgggcgcgagggtcaggctgagcagcagattttcccggctgaactggcccagcgccgcatagggaatcagcttgaccgcgttggtcatcaggaagaacagattgatggtcgcgacatagcgcaacttgtccaactgctgcggcagcaagtgcatcatgatcggcggcccgccggcgtgggccacgaagctggtgaagcctgcgatcgacgacagcatgacgccacgcccgcgctgcaaaggtcgaggcttgtcgttgcgattgacgagcccgagtagcacgaaccccaccgcgatcgcgcccatcagcaagccgatgaggcgctcatcgagcatgccgaaggtcagcgtacccagcgcgatgccgatcaatgcgcccggcatcatgaccttcaggttcgccttgtcccagtgaccgatataggccttgaggccgaccacatcggcgagacagaggatcggcagcatcacggccgccgcctgcttcggcgagatggccagcgctagcaacggcacggcgatgccgccgagggcaccaccgaagccgcccttggacagtccggtgaggaagatcgcgggcagcgcgaacagcagaaaatcggcaagggtcatgacgggtggtggcgctcgactggaaatggattgcaaatgagtcgtttcggcgaccgatcaatcatcgcatcttttaccggccgatcagcttgttgcgacggagcgaggggcgttcggggaagtatcggaggcagagttgggcgcatggttcgggataggccacgcctgtatgtggtcgcatgaaatggcgggcgtgcgacaccggcccgtctgtccgttcaaattcaggtgccgtatggacgtacccaacctagccttttgctcaatcaccgacggaacgccgttgcgccgccttatggtcggttcgacgctgctggcggcggtattcgccaatggcgcgagcgctgacgaggtgggcgagctggtgagtttggtcaatgagttccgcgcctctggcgaaggctgcggcggtggcaaggcagaacaggtcggccctcttgcacctgccgctgcactggcgtcgatcccggccggtgctggcgcgcagatacagcaggcggtgcgggagtcgggttaccaggcggccagcctccaggccatggcagtgtccgggcccggcgatgccagcactgtgatgcgggtgttcaggcaacgttactgcagcgcattgttgagcgaggatttcgccgaaatcggcgtctcgcacggcggcaatatctggcaggtgattctggcaaaacccctgctgtccgacgatcttggcgactggcagcaggccggcaaggcggttctcgaacaggtcaaccgagcgcgtgccgaggcgcgtcgctgtggcaatcagcggttcgacgctgcgcctccgctgacctggaaccagcgcctgggcgaaaccgcgctggcccacagccaggacatggccaagagggattacttcagtcaccaggggcatgaccagagcctggccggtgaccgcgccagtcgtcagggttaccgctggcagcgcatcggtgaaaacatcgcggcgggccatggttctgccgagcaggcggtgtcaggctggctcgccagcccgggacattgcagcaacatcatgaatccggagttcaccgaaatgggcgccgcctacgcgaccaatcctcggagcgcggccaccatctactggacgcaggtgttcggcacgccgcgttagcctgttgcgctacggcgcgccctccagccagtcgtgcgcttcggtggtttgatgctgatcgaaagccttgactgtcagaccggggatcagcgccccttcgatctcgctggccttcctcatccattccttggcgcaaacgactgcgcagcgatcgaaacggcgcatgaagcggaacatttgggggattcgcgacagctcgacaccgaccgcgccaagcgtgggcatgtcgaagtctccgactcgaaagagcatctgcccatgggtaatgccatcggactttctcatcaactcatcgagcgcgaagcgcatctcgttgctgtcgagcttgccggaaaagtccacgtcgatacgtttgtcgcctatacgcgttacatgaaacatcacgtcgctcctttagaacggtaaatgacggttcggtctcgttccttgaccatagctcctgtggcgcgttcgctcgaaaaaaagcgcgtcgcggcaccgtttcattgacgctcgtcgacgctcttggggcgccatctaaggtggcgttaaaacagctatagagcggtttagaccagatgattcgcggcgtgtcaggcggccgatgcggcggacggaccatgcatgcgagtgactgattaggctgaggcgggccgtgtgaggcggttcgatcgatcggacggtgaacgcggagaaagcgcgttcgaggtgaaggcaggcagcccccgcgcttgacgcgggggcacaggatcaatcctggcggctggtcacttccagcaggtgataaccgaactgggtcttcaccgggccctggacctgattcaacggcgcgctgaataccacggtgtcgaattccttgaccatctggcccggaccgaacgagcccaggtcgccgccctggcggctggaggggcaggtggagttgtctttggcaacctgggcgaaatcggcgccgccttcgatggcagctttcagctcgttgcacttttcttcggtgggaaccaggatgtggcgggcagtggctcgggccatgggggtgtactccagtgggaaagtagcgagcctaccggatttgctctgcgattcaagcgccgcctccctgcaagtccgttccgacacaccgaccgccggcgtcccgatggcttcggtcatgatctcgtcatcgctgctcactagcgtgaatcagggagccacctgaacctggcttttctctcacgcttaccggaagccaacgatgaccgacgatctgggtaattcgctccaggtgtacgagcacctgttgcacgagtttcaggacagcctcgacgaagagtttgaaatggagctggacgatgcgcgcatggatgccttgataagccgcgaaggcatgccgcaaccgtcggatagcggattgtcccgacgggtctatttctccgagctgctgcgtctgcaaggcgagctggtcaagctgcaggactggatcgtgcatcacaagctgcgcgtggtggtgctcttcgagggccgggacgcggcgggtaagggtggagtcatcaagcgcgtcacccagcggctgaatccgcggatctgtcgcgtcgcggcgttgccggcgcccaacgatcgggagcgtactcagtggtatttccagcgctacgtctcgcatctacccgccgcgggcgaaatggtcctgttcgaccgcagctggtacaaccgcgccggcgtcgagaaggtgatgggtttctgcagcgatgacgagtacgaagagttcttccgctcggtgccggagttcgagcggatgctggtgcgctcgggcatcatcctgatcaagtactggttttccatctcggatgaagagcagaaccggcgcttcctggcgcgcatccatgatccgctgaagcagtggaaactgagccccatggacctcgaatccaggcgtcgttgggaagcctatacgcgggccaaggaaattatgctcgagcgtactcacatcgacgatgcgccttggtggatcgtcgaggccgacgacaagaaacgtgcgcgcctgaactgcatcagccatctgctgagccagctgccttatggagaggtggagcgcaccccggtgaagttgcccgagcgcgtctacaacccggactatctgcgcaatccggtgccggacaacatggtcgtgccgacgctctactgagcgccggtcgcgctcggctcctgcgcttgttgcagcgctgccaggctgcgcgcatagcgctcggccttgagtggcatgtagccggtgaaatgaatccagctcggcaagccgtccaggtagtgttcgacgaaggcctgggtgaggggtttgcgctggaggctctgttcgctcaggtacaggaatagcgggcgcgtcagaggcttgtagcggccctcgctgaccgtttcgagcgttgggaagaccgggccgctgccattgtccacggcaagcagcttcaattcctcccagtgccgatggtaggcgccgatgccgaagaagccgagcgcgtcgggctctgcggcgatgccggcggccaactgttgctcatcctcgctggcggtgtagtcctgacggctgcgatgggtggttcccacgatctcctgggtgaacacatcgtaggtgcctgaatcctgccctcgtccgaacagtttcaccgggcgatccggccactccgggcggatctggttccagcgcatgacttgcccttctgcagccggtgcccacaaccgcttcagctcatctaccgtgatgtcgcttgcccaacggttgctcggatgtaccaccacggcaatggaatccatggccagcgggacctggcgatagcggatgccattctcggcgcaatgcgcctgttcttcggcgttcatctcgcgcgatgcgtcgttgatgtccgtttcgccggcgcagaagcggcgaaagcccgcagtggttccggagaacttgacctcgatggcatgcccgggccgggcgcgctgaaagcgccgcgccgcttcccgtgtcagcgagtaaacggtgctggagccgtcgacgagcagcccatcggtcatcggctcagcggcatatgaggacggagtgagcaccgcgtgcaggctcaaagtgaggctgatcagcagcagagggcctggtttgacgtgcatgtgtggttcctctgcgggcgtcaggatttcgctttcagccattcggccttgagggtggtccagaacagctggagactgttgaaacgggtgtccactgcattgatgtattcgtccagatgctcgatttcacggtgctgcgcacgttgctcctgagcatcgatgcgttccagctgggcttcgagctcattgagcgattcgcgcaattcgcggatgcggttttcggtctggatgcggcgttcgctttgcatgactgggctccaggcgggtcagagttggctgccgccgatcagtagcaagggcaggccgaagaacacgccgccgatatacgccccgacatacagcttgctgcgttgcgccagatccgccaggtagttggcaatggccggcggcacgccacgcaggaagggcagcacgtagatgatcgagataccgagcagattgaacagcaggtgtaccaaggcgatctgcatcgcgagttccgccgttggcccggcaatggccgtggcggccagcagggcagtgacgcaggtgccgatattggtgcccagcgtgaagggatagacctgcttgagcgtgaacacaccggtgcccgccagcggcacgatgagggctgtcgtcgtcgaggaggattgcaccagcatcgtgatcagcgtgcctgaagcgatgcccgacagcgggccgcgcccgacgctggcgtgcatgatgtccttggcgcgcccgaccatcaccttgcgcagcaccttgccgatggcctgcaccacgaagaggatcaggacgacgccgatggcgattagcgcgaccccggcccacacctggctcggcagccaggagacgctggtttcgagcaggtcgctggccggggcgagcagagtcttcatgaagttcatgctcttcacgtcgaccccggcgctgtcgtgtaccagcagacctgccagggcctcggacatgcgctgcagaggatggaagagcaattccagcggcagcagaatcgtcacggcggtgatgttgaacgcatcgtgcacggtcgccgccgagaaggcccgatgaaattctggcccgctgcggatgtggcccaggctgacgatggtgctggtcagcgaggtaccgatgttggcgcccatgatcagcggaatcgcaatcgggatcggcagcccgccggccaccatgccaacgatgatcgaggtgaccgtgctggagctctggatcagcgccgtggccgccaggccgatcatcaggccgacgaaggggttggtggcaaaggcgaacagctccttggcgttatcgccagtggcggctttgaaaccatcgccgatcgcgcccactgcggccagcaagagatagatcagcgtgatgaccagaagccaggacagccattggcgtgtgatcggcgaggagggggtctccgccagggcaccggtgttcgtcgtcatcaggcaactcccgtgagcgttcaggttgcttaacggtgtcgcgctggtgtgaaggcttgatgaccgcagcgggctgcggggataagcggcaggtcgacggcgtttcgatgcggcagacgggcagcctaacgggtaggcgatacgcgatcgcgcggccattgcgggacgccgcgccgaacgaacgtcgggcctgcatcacaggcccggtcgaatcacgcggcgtcgctgctgcgctcggaatgctcggcgggctgctcgagcaggtagtgttgcagtcgctctttctgcgtctcgttgaaggccagaccaagtttggtacgacgccagagaatgtcgtctacctggttcgcccactcttcgcggcgaaggtagtcgacctcctgcgcgtacagctgctggccgaggtcttcgcccagctcttccaccgaacgcgcgccgccgagcatgcgccagacgcggctgccgtacagcgtcgcccagcgcttggccagttcgacatcaatgccttgtagcttggccagcaattcatcggtaagcgcctcggccgagcccatctcttcgccgccgggcaacggggaagtagccgtccagctcgtgcccatctcagggaaatacggcttgagttgcgccatcgccgactcggccagcttgcggtaggtggtgagcttgccgccaaacaccgacaacaggggcgcctgtttttgctccgcagccagggacaaggtgtagtcgcgggtgacggccgacgggttgtcggactcgtcatcacacagcggccgcacgccggcgaaggtatgcaggatgtccttggccgccagctgcgtacggaaatgcgcgttggctacacccaacagatagatgatctcttcttcgctgatgcgcaccgtggccggatcgccgtgatactcgcgatcggtggtgccgatcatggtgtagcggtccagatagggaatggcgaagacgatacgccgatcctcgttctgcatgatgtaggcctgttccccttcgtacagcctgggtacgatgatgtggctgccttgaatcagccgaatgccgtaaggggaacgctgctgcaggttctcaccgatgaactgcgccacccaggggccggctgcgttgaccagcgctttggcccgcagggagaagcggctgccgtcctgacgttgcagttcgacatgccagatgccaccggcgcgcttggcgctcaggcagcgggtgcgggtatggatatgtgcgcctttttcccgcgcggccatggcgttgagtacaaccaggcgcgcgtcgtctacccagcaatcggagtattcgaagccgcgacggatcgccggtttcagggggctgtcgtcgccgaagcgtaggctgcgcgaagccggcagcttctcgcgcttgccgaggtggtcatacaggaacaggcctgcacggatcatccacgcggggcgcaggtgagggcgatgcggcaacacgaagcgcatcggtttgacgatatgcggcgccttggccagcaagacttcgcgctcggccagcgcttcgcggaccaggcggaattcgtaatgttcgagatagcgcagaccaccgtggatcagtttgctgctggccgatgaggtgtggctggcgaggtcgtcgcgttcgcacagaaagacggacaggccgcgcccggcggcatccgcggcgataccgacaccattgatgccaccgccgatgacggcgatgtcgtacagctcggagacgctctcagtcacgggattctcctcaataacgaacatttgttttcgaatgtgaacatcctagctcataagcgaatcactctccagagcctatgttcgttttttataccaaaagaaaataatcgaaccgatatggcctcgctattggtgcttaaccgagcgtcggccgattggacatgaagcagggggagctggtgtggctggcaggccaacgtgacggatatgcaatcggcgggatgggctggagcctgaactcggccggcgggctcgaccgcgtaggcggggcgcagccatgagaagcagcggttgtgatcgggcggacagccgttgaagcgctagcgggagggcggcattgcaccggcccgccgctcgaatgcgctcagcctgtgacttccagcttgaccttgtgtcggttgagcaattcgagaaacgcctcgggtggctgggcttcggtgaatagcatgtcgatctgctccagcgagccgaggcgggtcatggcgttgcggccgaacttgctcgagtccgccgcgagaaacaccttgcgtgcgttgtcgatgatggcctgcgacacccggacttcctgatagtcgaagtccagcagggtgccgtcttcgtcgatcccgctgatgccgatcagtgcgtagtcgaccttgaactggctgatgaaatccgccgtggcctgaccgaccacgccgccgtcgctgcgcacgttgccgccggcgatcagtacgtcgaagtcttccttggggctgaggatgctcgccacgtgcaggttgttggtgatgaccttgaggtcgcggtggttgagcagggcgtgggcgatggcttcggtggtggtgccgatgttgatgaacagcgaggcctgatcgggaatgtgcgccgccatggcgtcggcgatgcggcgcttctcgtcgcgcatctgccgggcgcgctgggtgtaggcggtgttctgcacactggagtcgtgggcggcgccaccgtggtagcggcgcagcagcccggcttctccgagctggttgatatcacggcggatggtctggggcgtcaccgagaactgttgcgccagctcttcgatgctgacgtagccgcgttcgcgcaccaattcgagaatgctctgctgtcgtggggccagactcatggaggcttccttcttatcgatatgccgcgaaggatgccgcagtctgggctttgattaaagaattgttcgtttgcgaatagaagcgcccggcgcggaatcggatccgcgccgggcgcatggggaggccgtcagcgggtcgaggcttattcctcttcccagtcgcgggtgcgacctactgccttcttccagcccttgtagagcgcttcgcgcttagcgtcatcacaggccggttcgaacacacgctcgatggtggctttgctgcgcaactcctccaggctgctccagaaaccggtcgccaggcctgccagataggcggcgccaagggcggtggtttccttcatttgcgggcgctcgacctgggtgccgagcaggtctgcctggaactgcatgaggaagttgttggccaccgcgccgccatccacgcgcagtgagcgcagccgctcgccggcgtcctgctgcatggcgtcgagcacgtcgcgggtctggtaggcgatcgattccagcgcggcgcggatgatgtggtcgaccttcaccccacgggtcagcccgaacagcgcaccacgcgcacgcggatcccagtagggcgcgccgagaccggtgaaggccggcaccaggtagacgccattgctgtcctggaccttggtggcgaagtattcggaatccagcgaatcattgatcaccttcaactcgtcgcgcagccactggacggtggagccgccattgaagatggcgccttccagtgcgtaattgacttcgcctttcggcccgcaggcgatagtagtgagcagtccgtgttcggattgcacggccttggtgccggtgttcatcagcagaaagcagccggtgccgtaggtgttcttggcctggccgggttcgacgcacatctggccgaacagcgcggcctgctggtcgcctgcgatacctgcgattgggatgtcggtgctctggcccgatcccaggtaagcgtggccgtagacttcggaagaggagcgcacctccggcagcatttcgcgcgggatatccagcgcctccagcatcaccgggtcccagtccagcttgtggatgtcgtagagcatggtgcgcgaggcgttggtgtagtcggtgacatgggccttgccctgggtcatcttccagatcagccagcagtcgacggtgccgaacagcaattcgccacgacgcgcgcgttcgcgactgccctcgacgtgatcgagaatccacttgatcttggtgcccgagaagtaggggtcgatgaccagaccggtggtcttgcggatgtgttcttccatgccgtcacgcttgagctgatcgcagatcggcgtgctctggcggctctgccagacgatggcgttgtagatcggccggccggtggtcttgtcccagacgatggtggtttcgcgctggttggtgatgccaatcgcggctacctgctcgttggtgatgccggcctgggcgagggcctcgacgaacacaccgctctgggtggcccagatttccatggggtcatgctcgacccagctcggctgcggatagatctgcgcgaattcgcgctgagcgatggtcaccacgttggcgttgcggtccagcacgatggcgcgggaactggtggtgccctggtcgagggcgacgatgaattgcttattgttctgagtgctcatggtgtcgattccttaacgagcttcgtgggcagtgacatcgtgtttggagtagcggtcggcctctggttccggttcgggaacagcgcaagcaccgccaatgcctggcagatgcttgcagatcagcgccttgtagccggcggccccgaggcaggcgccgataaccggcgcgatcagcggaacgagaaaatagggaatgtcccgcccgcccgtgaaggcgacctcaccccagccggcgaaatacgtcatcagcttgggtccgaaatcccgcgccgggttcatcgcgaagccggtcaaaggacccatcgcgccgccgatcaccgcaatcagcaggccgatcagcaagggcgccagcggcccacggggcaggccgttgccgtcatcggtcagtgccatgatcatccccagcaggatagcggtaatcaccacttccaccagaaacgcctggccaatcgagagtgacgggtgcgggtacgtggagaacaccgatgccagttcgaggctggcaacgctgccgcgggtcatgtgctgtgcctgttcgaaatcgaaaaacaggctgctgtaaaggccataaaccaacgccgcggcgcagaacgcgccagcggtctgggcaaggatgtaggcgggcaccttgttacgctcgaaggtgccgaacagccagagcgcaatggacaccgcagggttcaggtgagcaccggagacgcccgccgcaaggtagacccccatgctgaccccgataccccaaataacgcttatttcccaaagacctagctcagcaccgccgagcttcagcgcggccacgcagcctgtcccgaagaagataagcagggcggtgccgaggaattcggcaatgcattgcccccgtagcgtcggggtggacggattgctcatgcgcaggacctcttctgagtctgttgtttttatgatccgaatactgcgtgagttcggaaatgttcggaagcgaaaacttagggtcaaaagcaagcgctgtcaaagtaaaattttgaacattatgacggtaagctgacgaaaggccgcctgccgcgtgcctgtggcggttttttggctggcaacgctatcggtgtgcgtaggctgcgagaggcgtgtcggtgtggggcacggcctggttggggtggcacggccgggctgactgtgttgagtgagcgagcagctggttgagatggcggtcgatttaggcgcggcgtagccgatcaatggcgctggctcagcgccgcagacgcgacagcgtttccggatcaggttcagccgcgtaaaaagtattcagcaccgcctggaactgggggcgctcgggcgcgacgctggcaaacaaggtcatgctcgagcgcagcttcatatcgtcgggtgagccgaggatctgtcgcaccggacgttccgcgtggtcgagcaacgcttcggcacaggcctccaggcgcggtccgagcagcggatgctgcaggtatgcggccgcttcatcagtgtcactgatggcgtagcgccgtgccatgtcgctgtggccgaggcctgcaatctgcggaaagatgaaccacatccagtggctctgtttgcggccggcttgcagttccgccagtgcgcgctcgtaaaccgaccgctgtgcatcgacgaatcgctggagatcatgcggatcgctcatggcctgctccatttgctggctgtcgaacatctagaggccctgcgcaggcggtcgatccatcgcagtctgtccgattcgccgagtggttgcggtctatacgccggtgtcgttcataggcgcttggtcgcaggcagagcctgctcctacataaatcggggtgtttcgtggagcatgaacctgtaggagcgggctctgcccgcgaccggtgggtgcagtctattgcgttgagtgtcggtcatggtcatgcggtcgcaggcagagcctgctcctacataaagcggggtgtttcgtggagcatggacctgtaggagcgggctctgctcgcgacccgtgggtgcggagctatgcgtcggtgtcgttcataggcgctgggtcgcaggcagagcctgctcctacataaagcggggtgtttcgtggagcacggacctgtaggagcgggctctgctcgcgacccgtgggtgcggagctatgcgtcggtgtcgttcataggcgctgggtcgcaggcagagcctgctcctacacaaagcgaggtgcttcgtggagcatggacctgtaggagcgggatttgcccgcgaccacgtgggtgcggatctatgcgccggtgtcggtcttgggcgctgggtcgcaggcagagcctgctcctacatgagcgattgtgggggcggtctcgtgggaaacggggcgtttgtgtgtgatggccgcggcgggggctgcggcaggcacgttaccgcttggcgttgaaacaaccctggcacaaccggaactgccggcccgccactggcatggccttgccgcattgctggcactgacggcctccggacagacggcggcgatccgaactgcgtggcttgcgctggcgggacagctcgcgagtgatcgcgccgttgagcaggctgcggtgctgctcggcctgctccagggccgggaaattcgcgggcagggtacgggccagatgcaggtaggtttcgatgacgtgcagcgagctttccagcgttgccaggtcggcatcgatgatgagtcgcggcaggggtatttccttgtcctgcgcaaccttcttcaaccattgctgggcgtggtggctggccgggctgtcgagaccgccgcggatcggcgtgcaggcgaaaatccagcgcagcggcaggtcgatggtcgggtcgtcgatcagcttgatccactccgccagctcgtcgggcagaatcgaaatgaattcgtcgccgtagttgatgttgcggttgaaggtcagccaggcgcgcagcaggctcggctcgttcatcagctcggagatggcctgcagatgctcgatggacggcctgacctggaactgcgatagatccaccggcaggtcggcgctgtggaacaggcgtttgatcgactgcagcgtctgcccgtccagcgcggtaatgaggccgctgtcgtggtggccgaagcgcccggcgcggccgccgatctgcttgacctcctgcaccttcaactggcggttctggataccgtcgtacttttcgtcggtgtagaaacacagggtgtgcgccggtaggttgaggcccatgccgacggcgtcggtggcgaccatgagatccgcctcgccctcacgaaagcggcgtgcctgctcgcggcgaacttcaggcgacagcgcaccgtagaccaccgagacgctcttgcctgtcatctccagcatcgccttgagctccagcaccgtcttgcggctgaaggcgaccagcatcgagccggcgtccagctgcttgagcgtggtcgcgcgacgcgccacgtcgacgggtgacaggcgtttggtgcgcttgaccaccagttggtcatcgcacaggtcgcagagggttttcagcgacggctggatcagctccgggccggtcatgatcaggtcctgggtgtaggcacttaccaacgcatcgatccaggcccagccacgttgcgagtcggccatcatctgcacttcgtcgatcacgaccacgtcccaggattcatggcggaagcgggcgaattcctcgacggtgcagcaatagtgcgtcgcaccctcgcgaatgatttcctcctcacccgtaaccagcgagcagggcacgcccagggactcgatgcgctcctggttctccagcgccatcagtcgcagcggcgagaggtagatggcgtgcgtcacgccggtcatggcctggatcgcctggtaggtcttgccgctgttggtcgggccgagcagggcggtccaggtgcgggtgatccgccgcgcggcgtagagcttgtggtaatggacgaagcgcgggttgttttccagcagcaccgcaaaggctatcttttcccggttgtcctcgcgggcgaagcggatggtgcggcgcagttttttcggctccatcatgaagacctcggtcagacgcttctcgccgagcagttgcagatcgaagtcctgggcttcctcgatcatcatctcgaacttggcattcatggcctggcggtcttcttccttgagtgcggcgacttcctggtcgctgagcacatgcccctggccgccggggatgcgccgctgcatgtccagcgccagctcgccgtggcgcagctcgaccacataacgcagctcgtgcttgacctcgttgacaatgtcgacggcgcgcgccgcgaagtcatcgaggcgtgaaagccgcgcgggcaggcgctccaggcaccgggctttctgttcatcactgaggctggtgaagggtttttccagaacgtgcaggcgatcccggaccagggtctgcaccgcggcgcagacgttgtgctcaaactcatcggtcgagcggctgtcctcgatacgcagcgtgaattcgggctcgagcaggttctgcaccgggccgcaatccagggttttctcgacgccgaagatatccaccgtgcagctgaagtcgttgacgtcccggttcagtagtcggccgatcaggctggcgggtgcggcgccttcaaggttcgcctcgacggttgcgtcgtccagcccgagccagaacaaccgcgccgcgcggccgatttccggcggctggaagccaaggtaggtgctgaaccacttttcctggtgattcttctttggcgcgaagtcgggatggcgctcggtggtccagttcaggaatcgctgaagtctttcgagcttgtgggtgtggcggtgtttggcttcggccttgcgcatgatcgacgcctctctgatcaggtgtgctgcgagtttggacaatcggaccgcgcaatacgagcggcgcgcaaatatgccatgcgtcgggcgcgagggcaccgcaacgtggaccgaggatcatgtatctcgatgcatggtcatctgtacagacaggctcgacgggagcgggtatgaagttgggcagttcgatgtttctgggcacggccgggtggagcctagcgcgcgatcaatggccagcgttcccgccggctggcacgcatttgcaacgctacgcggctcgtctgccagcggttgagataaacacgtcgttctaccgtccgcatcgtcccgctacctatgtccggtgggcggagagcgtgccggacacgtttcgcttctgcgtcaagatgcccaaagagatcacccacgaacggcggctgatcggctgcgaagaagcactcgatcgttttctgcacgaatgtggccatcttgggcacaaactcggttgtctgctggtgcagctgccgccgtcgctggcctttgatgcggccaatgccgcggcgttcatcgaggcgctgcgtgcgcagtatgcagggccggtagccatcgaaccgcgacacccgagctggctggctgccgaagcgttactacaacagtcagggattgcgcgggtcgcggcggacccagcgccctttcccgaggcggccgaaccaggcggttgggccgggcttcgctatttccgcctgcatggctcaccgcgaatctactactcgtcctacaccgacgactggctcgagacgctgcaactgcgcttcgccgagcagccagcgggaacgcccatctggtgcatcttcgacaacaccgccagcggtgcggcaactgccaatgtgctggcactccagcaacgtctgggctgagatcctgttgcccgcgatgggccagcctcagcgcggaatgattcgcacccgtccggccgtgttgtcgcggcgcccggccttgtcattggcggcgcggccgggaatggtgccgtcgtccgcgccgcgatcgggcatggccatgccgtcgagcttgcgctggtcttcgctgatggaggtggcgtcgggatagccagtggtcagggtttcggtactggcggtgaccggcgtcgcgtcatcatcgccccaactggcgctgcgctcgtcgatatcgatggcaccgttttgctccatcacctgctcgaccatcgagacctggccgtcgtcatcgagcgtgaccgtcaccacggtcgagccgcggcgggcggcttccggataacggcccgcatgctggctcgcatcgtcgccgaaaaccttgctgaagaaactgccgattttttctgccaccgtggcgtcatggtccggctcctcgccgatcacttcgacgcggctgctgttgacggtctccgggttcaaggaggcggatagctgtatggcgtcgctgctcacgcccttgctcagaagttcggttttgacgtgctcggcttcggcgtagcggtcgaacgctgcgatgaggatctggggcatgatttctccttgcggtatgcaggctggctgcggttggtgcgtgggtgcgcgccctcattgaggtgcgctgtcatgccagttgggcggagcaggtgaggggatggttccgtgcgttctcgttacccgatgcgtccgctgccaatggcagccgctggcgccgcgcccgatggcgcggcgtgaggcggctcagccgttgaccaccttgccgccattgatatgaatggtctgaccgctgacgtaggacgaatccttgcaggccaggtaaacgtaagccgggcccagctcggatggctggccgcaacggcccatcggcatctggctgccgaagtcttcgagcagctgcggatcatgcttgcccagggtcgccggttgcagcggcgtccagatcggcccgggggcgatctggttgacgcgaatatcgcgctcgatcagctgttgcgacagggcgcgggtgaagccgtcgatggcgcccttggtcgcggtgtagtcgaccagcatcgggttgccgatgaatgagttgatcgaggtcgtgttgatgatcgaggcgccggccttgaggtgtggcagggcggcgcgggtgaggtagaagtagccgtggatgttggtggcgaaggtgttttcccactgttcatcggtgatgtcttccagtcgggtctgcacttcctggcgccctgcattgttcaccagcacgtcgagatggccgaaggtcttcaccgtttgcgcgaccgcttcgttgcagtgcgtgctgtcgcggacgtcacccggcagcagcaggcagcgccggccctcggcttcgacgagctgcctggcgtcttcggcgtcctcgtgctcgtcgagatacatgatcgctacatcagcgccttcgcgtgcgaagtgcagcgccgccgctcggccgataccgctgtcgccgccgctgaccagcgccaccttgccggccagcttgccgctgcccttgtagtcgtcgcggatgaattcggccggcggatccatctcgcgctccaggccgggcaggcggtcttgtttttgcgcatgaatcttcgggtaagccatgatcacctccgggcagcaatgggtcgtgtagatacggctgatgtgcgccgggaaagtttcggacggacgccgagtggtgatgcgtgtccgaccggtgatcggaaatggcgttgcgttcgctgctagcgcttggccattagtcttccctgacctatagtgccgcgcgccaaggatggccgcggaccccagcgtagggccggtcgggtcgtccacgcctaacaccgcaaaggattgaaagatgaacatcaagcaacttctggttctgccgcttaccgtcgcgctgctgtccgcctgtaccgcgaccacttcactgcgctcgagcgatccgagcctggccgtgaagatcaacgacgatgcacccttggtgctgaagaacccgatcagcaagacctacaaggccaccagcttcggccagtatcgtttccgcgcgacgcaggaaggcatggagcccatgtacgggatgatgccgctcaagttcaacggtggttacctggccgcggatatcctcttcttcgcgccggccgccttctacaacctgcgtgaggtctatccgttctacgagttcgacgtggcgcaaggcgtcgtgcgctacaagaagaacgagggcgatcaatggatcagctacaagccgaccgctgcagaagccgagcgggcgcaggcgtatttcggccagtaagactcatagcgcgagcatcgctgcgggctgccatcgcggtccatatcccagggccataccccctcgccccgctggaaagcgtactggggtgaggggacggtgttccaggcgaacccggtcatcgcgtacgttcacccgttgtgccggctgccgacagccagtcggcatcattctgtcggcgggtcgcggccgctcgtcgcggaccgctttcacagcctgacatcggcacggcgcgggcgtagaatccgcgccgctccggcttcccgtttcgaactcctatcgctcccgccgacatcccgcgcttgctcgaagccgcggggcgtatgcgttgtggtcaagcagggccggctacttcttacacccttattcgtcacgctgtggtgtgccgctccggcgcgctgcgcttgccgagtggatcgcacccagacatgcctacatgaacgaatcgaacacccgcgacgggagctggctcagtgtcgtcgcgctggccttggcggccttcatcttcaataccaccgaattcgtgccggtcgccttgctcagcgacataggccgttcgttcgacatgccgccgtcacaggtcggcctgatgctgaccatttacgcttgggtggtggcgctgatgtcgctgccgatgatgctgctgacccgcaacatcgaccgccgcaccttgctgatcctcgttttcgtggtgttcatcggcagccacctggtgtcgagcgtggcctcgagcttcggcatgctgatgctcagccgcatcggcatcgcgctggcgcatgcggtgttctggtcgatcaccgcatccctggccgtgcgtgtcgctccgcccggcaagcaagcgcaggcgctggggctgctggcgaccggcagtgcgctggccatggtgctgggtatcccgctggggcgggtggttggcgaactgctggactggcgcacgacgttcctgtcgattgcggtggtcgcggcgctggtggtgctctgcctggcccggacgttgccgcgcctgccaagccagaattccggttcgctgcgcagcctgcccgtgctgttcaagcggcctgcgctggtcgccgtctacgtgctgacagcactggtgatcaccgcgcatttcaccgcttacacctatatagagccgtttgcgcagaccatcgcccacctgagcggtgatatgaccactgcgctgctgttgctgttcggcggtgcgggcatcctcggttcggtgctcttcagccgctacagcaatcggtatccgaagggcttcgcaaccgccgccatcgcggtcatggcgacctgcctgttactgctattgccggccgcaggtgatagctcgctgctgggcacgctggtagtggtctggggcatcgccggcatgtgcttcggcctcgccgtgcaggccaaagtgctcaacctggcgtccgatgccaccgacgtcgccatggcgctgttttccggtatctacaatgtcggcatcggtggtggtgcgctgctgggtagcctggtcacgcagcaactgggcctcggcaacgtcgggatcgtcggtggactattggcggtaagcggtgtcgtgctgtgcggattcgcagcccatcggttcgccaagccggtaggcagcgccgcgctctgactgcatcaaccgtcgggccggtttcactcctcagcgacggctggaacgccgacggcgcgttccagcctgccgttggggttacttgagttcgttggcgaagcgcccgaccgcgtcgaccacctgcttggcgccgtcctgaatctcgacaatcaccgcgccggcctggttggccaatgccagaccctgcacggcctgctcgcggctgttggccatctcccgcacggcgtcgtcgaccagcgcctggtttttctgcaccacgctgacgatttcctcggtggccgcgctggtgcgcccggcgagctggcgcacctcatcggcgaccaccgcgaagccgcggccctgttcaccggcgcgcgctgcctcgatggccgcgttgagcgccagcaggttggtctgtgccgcgatgccgccaatggtttgcacgatggagctgatcagttgggactgctggcccaaggcttcgatcccatgggtcgccgattccacttccttggcgatgcgctgcatggtggcgacggtgtccctgaccacgacggcgccacgttcggcgctggtgtcggtctgccgggacacgtcataggcgatgcttgcggcttcgcgcacctcggcctcgcgggcgacctgctcggtcacgacgctggcgaacttgacgaccttgcagagcttgccttcggtgtcgtggacagggttgtagctggcttccagccagacttcccgacccatgctgtcgatgcgcttgaagcgatcggcgacgaattcgccgcggttgagcgtttcccagaattgcttgtactgcgcggaggaggcttcctcgggggtgcagaacatccggtgatgcttgccgacgatctgcttgagcgaatagcccatgccttgcaggaactgctcattggcggtggccacggtgccgtccaggttgaactggatgaccgccgtggagcgaagcagcgcggtaatgaaggcttcgttctccttcgcctgttgcacttcgcggctcacctcgcgggcgaagccgcggatatgcagcaggccgccgcttgtgtccctgatcggataccagtcgacgtgcaaccacgccaggctgccgtcggcacgcaggtagcgatagtcgtcgccgatcggcgaaaggctggccacagcggcacgaaaatcgcggaaacacgacaggccggtcacataggccggtacgatttcggccattggccgccccagcagttgatcgacccggtagccgagcgcatcggcaaacttccgattgacatccaccattcggaactcgcggtccagcgtgatcgataacagtgtttctgtcatccgatcatgcaactggcgcagcagagtcagctcggcggcttgctccacgagttgttttttcagttggccgttgaacatgcaagcaccagaaatggacgaaggtgcgaagctatcggcacgctatcgccatacttgatgcccgcctgcgccgatcggtggtcaatccagcctttcgacgcgcaccgggatgacgcccgcgcgcgggttggcgatagccgtgaacgccgccttggacagatcgacaatgcggttgcgcacgaacggacctcgatcattgacccggaccaccacgcttttgccgttgcgggtgttggtcactctgatccgagtgccgaacggcaacgtgcggtgcgccgcggtcaatgcatgctggtcgaagcgttcaccgctggcggtcagcttgttgtggtgctggctgccgtagtacgaagccttgcccgacccgatccgcgttgccgattcgccgggcgccgcggtcggcggccgttcgggcgacggcgaggtggcgcagccagcggccaagagaacgacgatcgagagggtgatccagcgggtcggccaggtacgcatatccatcctttgggcagggctgccggtgcgcagttgtcttcaagcagacgctgtcgggcgacgaaaggtttcgtgagcgcgccgggtgaatgccaacgactgcaatcatgaacccgcgcgggaacctggcccgcgcggggagggatcaatgcccgggcttggccagccactcgtcagcgatgcgctggtactcgccggtggccttggtcaggtgcagccattgatcgacataggccttgaacgcgacgtcgccacgcggcaacaagaaggccttctcgctgtactgcagcggcttgtcgggattcactgcgcatagcgtcgggtagttacgctgctgatactgtgcctcggacgagtcggtgatcatcacatcggccttgttatcggccacggatttgaaaatcactgtgttgtcgtggaacagctccagctgcgccttgggcagctcgcggtgaacgaaggcctcgttggtgcctcccggcggctcgatcaggcggaccgagggctggttgagctgttcgatggtctggtacttctcgacctcatcgcagcggacgaagggaatcttgccgtccaccgcgattggatcgctgaagaacgcctttttctgccgctcgagcgagatggacacgccgccgacggccatgtcgcactgggcgagaaagtccggcatcagcgtcttccaggtggttggtacccactcgaccttgacgcccagactcttggccagcgactcggccagggcaatgtcgatgccctcgtactgcttgtcgtcgcgcagaaaagtgtagggcttgtagtcgcccgtggtgcagatcttcagggtgccgcgctgctgaacctcatcgagcagcgaagcggagggggcggcgaaactcgcgccgctggccagcagaaggccggccgcaatcagaaatctcatggttgttcctttgcaagggcgggcgcagtggcccggttattgttctggtccgcgagattaaaaggcggacagctggaacgtaccggacgcagagggttcatcacaaggccaatggctagcgggttcgcatttgctggagcagtggcttttgtgggagccccgccctcgtgcgaagcggggagcggacagtctctcgtcgtgcgctgacgtcgcgctgctggggttgcaaaggccgtattcgccgcgggtcgcggctcccacaaaagtgcgtcgagcagcgaaggccgttgtgggagctccgacctcgtggcgaagcggggaacggtcaggctctagtcgtcgtgcgctgacgaggcgctggtggggttgcaaaggccgtattcgccgcgggtcgcggctcccacagaggtgcgtcgtgcagcgaaggtcgtgtgggagccccgacctcggggcgaagcggggaacggccaggctctagtcgtcgtgcgctgacggggcgctggtgggttgcaaaggccgtattcgccgcggggcgcggctcccacagaggtgcgtcgtgcagcgaaggtcatgtgggagccccgacctcggggcgaagcggggaacggtcaggctctagtcgtcgtgcgctgacggggcgctggtggggttgcaaaggccgtattcgccgcgggtcgcggctcccacagaggtgcgtcgtgcagcgaaggtcgtgtgggagcctcgacctcggggcgaagcggggagcggtcagtctctagtcgtcgtgcactgacggggcgctgctggggttgcaaaggccgtattcgccgcgggtcgcggctcccacagatgtgcgtcgtgcagcgaaggccgttgtgggagctccgccctcgtggcgaagcggggaacggtcaggctctagtcgtcgtgcgttgacgaggcgctggcggggttgcaaaggccgtattcgccgcggggcgcggctcccacaaaagtgcgtcgtgcagcgaaggtagtgtgggagccccgacctcggggcgaagcggcaagcgtttagccctgcggggagcggcggatggtcttcatcaaatcggccggcgtgatttggccgaccacgctgctggcgctgcccggttgcggcaggttgaggatgttgcccttgatcttgccgatcacgtgcatctcgcacggcttgcagtcgaacttcagggtcagcacttcatcgccatgcacgagctgcatgggggcgaccttggtgcgcaccccggttacgcccttggcctgttttgggcacaggttgaaggagaagcgcaggcagtgcttggtgatcatcaccggcacttcgccggtttcctcgtgggcctcgtaggccgcgtcgatcagctgcacgccgtaacggtgatagaaggcgcgggctttctcgttgtagacgttatagagaaacgacaggtgcgcttcgggatagaccggtggcggcacgctgacggccttgcggctgcccagcggacgcatcgcctcacgggcttcggtaagcgcctcgacggcttcgcggcgtagggccttgagctgcgaattggggatgaagaaagcctgtggtgcgtctacgtccacttcttcggcgtggtagatggtggtgcccagctggctgagcagctcagcgatctggccgggcacctgctcgggctttttcgcgtcgccgaacgggccgggcagcgagacagtggcgtaagcgccttcttcgctggtgacgtgcagttcaagcgcgtctgcgcgcagcctggccagccagcgcacgccgatgcggcgctcggcggaggtcttgagcagcgcctgttgccagttgtggtccaggttgcggttcagcggatggttagggcgcagctggcgaatcgcaccgggcatctcgttgggttcgacgcggtactgccagagcgattggccgtcttcctcgaactgctcaagcaactcgaccacgctggcgcggaaacccaccacctcgcgcttgaccagcacattgaggccgtcgccgttggacagaggctcgcgggtctgcacggtcatgtcatgcttgccgaccttgagcacttcgcccacggccaggccggtgaaggtcggcgaatcgaaggcgccgatgtcgatcttgcggtcggtgacgaagtagtcggtgctgccgcggtggaaggtcttgtccgggtccggcacgaagaagtgatcggtgcggccgctggaggcgcgggccagatcagggcgatccaggaggatttcatccaggcgctgacgatagtaagcagtgatgttcttcacgtagctcacatccttgtagcgtccctctatcttgaacgagcgcaccccggcgtcgaccagcgcgcgcaggttggcgctctggttgttgtccttcatcgatagcaggtgtttttcgaaggcgaccacctggcccttgtcgtcctttagcgtgtacggcagccggcaggcttgcgagcagtcgccgcggttggcactgcggccggtctgcgcgtgggaaatgttgcactgcccggaaaacgccacgcacagcgcgccgtggataaagaactcgatggcagcatcggtcgcatcgctgatcgcacggatttcctgcaggttcagctcgcgcgccagcaccagctgcgagaagccggcctggtcgaggaatttcgcccgctccagcgtgcggatgtcggtctgagtgctggcgtggatttcgattggcggaatgtccatttccattacgcccatgtcctgcacgatcagcgcatcgacgccgatttcgtagagttgccagatcagtgcgcgcgcggcgtccagctcgtcgtcatggaggatggtgttgatcgtgacgaacacccgcgcatggaacagatgggcgaatttcaccagttcggcgatgtccgccacgctgttctcggcgttgtgccgcgcgccgaaactcggcccgccgatgtacaccgcatcggcgccatgcaggatggcctcacgtgcgatggaggtgtcccgagcaggggagagcagttcgagatggtgcttgggcaaggacatgagcgcggaccgggtgcagatcgaaaggcgcgcattgtaaaggcttaaggagcttttgggactggccgccgggcgagttgggacgttatccgacttcgagcagcccggcagctcgccatcacgtacaccatctgcgacgaaaggtctgattttacataaatgattacaactcctattcgcgattgattactatccgtcttcgcgaagccagaggctcgtgcaaaaaaacaaaggtgtgcaacgccaccactggacaatacatggggaaatcgagcatgacggctttcaaaacgggcacccgggcacaggtgccctggcggagaaccagcgcagtagtgctctgctgtgcgccgttggttggaacacagatggtctatgcccaggagaccagcgcggtcgccgccgccgagccgtatcgcctcgcgccggtcatcgtcaacgcgaaggcttctgccgatgacgattcaaagtcggtcgtggcacaggaactctgggtgggcgggaaggtagcaaccagcatcctcgataccccggcttccgtgtctgtcgttaccgagaaggaaatcgcgcaacgcagcgccagcaccactgaggaggtgctgcaatatactcccggcgtcatcgcggatttttatggcaccgacgatcgcaacgactatttccagatccgcggtttccaggcgacgacctaccgtgacgggttaacgcttgggtccatgcgcggtgtccgcgaggagccgttcgcctacgagcgcgtcgaaatactgcgcggggccaattccacgttgttcggcccggccgacccaggcggctcggtgaacttcgtgaccaagcagccgcgcttcagcaagttcggtcaggcctatatcacctatggctcgttcgaccatattgagtctggcctcgataccggagatgcgaacgaagaccagaccttggcgtatcgtttcactgggaagttccaggacagcgagcgcgaatacgaccattctcaggacgacaataatcttgtgatgggcggcttgacctgggcgccgacggcgttcacctcggccacgctggtagtcgatcacctgcgccaggacaacacgccgaacagcggtggttacccgaaggacaaggaatatgaccgagacgagtttttcggcgagccgagttacaacttccacgatgttgagcgcaccaacatcagcgccaacttcagccatgatttcgacaatggtttcacgctgcgcagcaacctacgtcacagcgatctgagtgatgcgtacggctatgtctatatcaacgatagcgtcggacgaaccggcactttggttgaccgtggctacttgggattcgacagcgaagccgagcagttcaatggcaatgtgatgctgcagtacgacgcgcgcttcgaaaacatcgatagcagcagcgtagtgggtgtcgagtatctcgatgcatcgaccgagaatgtctccgtatatggctcggctgatccgatagacgtcaccaatcctgtttaccgcggcgtttcgcctgcaatcgtctacgagaacaaggatcgggacagcacggtcaagtcagtatttgtgcagcagaacctgtctttttacgagcgtttcatcgtcaccgtcggtatgcgcaatgactccatggacctgtcggagactgaccatcttgccgctagcaagacctcggataatttctctgaaaactctttccgcggcgcgctgacctacgtcgtcaacgacgaggtttcttcctatatcagctatgtggagtccgtttccccgcctgaagttggcgtcaccccggagcgcggtacgcaatacgaagtgggtgtgaagtactctccagtgcagatgaatgccctgttttcggcagccgtctacgagctgactcaggcagacgtcgccatcccggtggtccaacccaacggcgtcatcgaccagcaaaccgtaggcgaacagcgcgtgcgaggtgtcgacctggaagccaaggcagagctgaccgacaacctgagcctgataggcggctactcctacatggacaccgaggtgcttcgcggctctgtgcagcaatggggcgtgggggttatctcgatcaagggtaacgagcttgtctccgcacccaagcactcggcctcgctctggagctactacagcgtaccgggaacggatgtaagtgtcgggcttggcgcccgctacgtcggctcgtacaaattcagcgctctcaacgacactggcgagagcgatagcgcgacgctgttcgatgctgcgttcaactatgagatcgccaagggcaccgacctggcgatcaatgtcagcaacctgctcgacgagcagcatgtggtcggttcgggtacggcggactactacaatcctggccgcgaagtcacggcgaaggtcagctacaactggtaagcgaaaaaccgggcatttcgtggtggtccatacgcaggcctgccagggtgtacgtagaccctgctgccagcttctctaagtgagcagcaggagtcgaaatacccaagccccccaggaatcgctcgattgcgagcgaatccttacaggcctggtcggaaccttcctcttttggtcagttgcatgcaccgatcgaatgctcggtgcggtagttgccctgtgtctactacctgctccccgcacgctgccatcgctcggttaaccagacaaactgatcgcctcagttcggccagtgggtgtgacagagtgggcacaagcgaatgcgaccgaaagaagccacgaccttactctgttggaacagcgggacaacgatgggctgattcccaagggttatccatgcggcattgtccgtgcccaggcgagaaagcggttcggtcgagctgctaattggcgagcgttatgagcggaaggtgttcacgctgatccgctctcagcgcggctgctgcgtcagcttgctcgtgacgcagcaccaaaggtttcgttggtgtttggtggtccaactgggtgtccagcgatcagaccaacgttgccgctgcccagaccactccacccatcacgggcaggctcaccgccaggcgcggcgcgtagggaagcagcatcagcaaggcgaagcccgccagcgagatcaggccgagccaacccaccacggccatgccgcccggccagacctgacatgacgagtagacggcgagcccgagcagcgcagtgccggccggcacacatacgcgacgaagcccggtcggcacatgggggttgaccagttgcttccagtggcgctccttgcccaggcagaaacccagcatgccggcgtaggccagtacgaggctggcgaacagggctgaaccgttcatgaggatgctccttgggctgtgcggcctgggcgagccgagcgggcgtttcgggtggcgatgaccgccggaattttccacagggtccagccaagaataagccccatcgaagccacgctcgccagcagggacagccgcatgacgtccagcgcgccctgggccgtccacaggtccagcagcggcagtgtgagggccaacagcgcggcgaccgacagctgttcgcgccaggcagccagcggcttgcgcagccaggtgtgcagccagctcagcgcccaggtgccgaagaacaaccgcagctcccaatcctgacggtcagccagcgctgccggtagcagccggttgctccacagtaacgccacgcaggcaagcaagagtccggcgataaccgacacgttgaggccctctacgacgcgcagaaagcgagggttggccttggcctgtttgcgttgtttgaccgcatagagcacgagtcccgtaccgatcatggcgcagctgatcaggccacagatgaaatacagccagcgcatcggatagccgccgaactgcgcgaagtgcagacctgccatcacccgctgggtcagttgactggtgccagagggctccggcgcccggataagctcgccggagacgccgtcgaagaccatgccttcacccttggtcagctcgatgcgattgcccagcacgggacgcgccgtgacctgggcgttggcgaagcccgggttgctcacggccagggcgccgatcatgcctttgccgtagtgcgcctcggcacggctgacgatttcacccaatgccagtagcggggctgccggcgccgaggctgatttgtcgccgcgctcttcgccatgctgcgccggcccgttgcgcgtggcctgctgctcgccgcgatcctgctcgacagcgcgggcaggctgcgcctcacggaagtaagcctggcgatcgccgtcgtagagggcgtctattgcagctggcatgtagatcaggaagaaaatcaccaggccggtataggtgatcatcaggtggaacggcagcagcaggacggcgctggcgttatggccgtcgagccaggagcgctggcccttggcggggcgaaaggtgaagaactccttgaagattttcttgtggatgacgatcccgctgatcagcgccaccagcatcgccatggctgcgaatccgaccacccatatccccagcgtgcgaggcatgtgcagcgtgtagtggaaatggaagaagaagttgccgccgagggtttctcgcggttggacggtctcgccggtcagcggatccagctgagtaccgccgccgcctcggcgccgttcgccgacggataccccgagagccggcgagcgttcggtcggcaggtcgatgttccagttcgattcgtcgctgtggtgcatcgtcaaccaacgctgcgcaacgttggcggcggcggccggcgactgtacccgatcggtcagctcgggctgcatccaccagttgatctccttgtcgaacaccgccagggtgcccgtgaaaaaaatcgcgaacagcacccagccgagcaacagcccgcaccaggtatgcagccaggacatggattgtgtgaggcttcccttcatcgcaccacctccaacagttgcggccagaaaccgacacccgccagggggatggcgaggctcgcgccgaccagcacgcggcgcaccgatgcggctgaaaaagcccacagaatgaatgccagataaaccatgaacgacggcagcgaggcggcagtcaacgcatcgatccggtcaagcggcaataaccgcgcgacggcggcggtcgcggcgtaggtgaaggcatagccaccgaaaatggcgaggacggtacgcatggcgatgtcccgccagttaccgcccgattgcaacgtggaaccaatcacgacgaactccggaaccaaacagaaccatacgaaaagtacccagccgttgctgtgcttgtcggctgggcactgcctctttcatgagcggtaatcttccgtgccgatgcgctcggaccaggccgatgagttggcagcgcaaggccccatcgagccacgagacacaccttgtggcaggccgtctcgttcgtcgcctcagaaggaaacgctcatcccgaccgtgtagcggcgtccgtccaatacggtttcgtagcttgcgtagtcgatctgctcattgaaaacgttgtacacaccggccagcagcttgaggttctgattgacgtcgtaggtgccgccgacatcgaccagggtgtaggcgggtgtgctctcggccatgctggtacgcgacaggtattcggacgtttcgctgcggtaattgagccgtgcccaactgcccagacggttgcttgcctgccagtccagcgtggtgttgaacatgtgcttgggcatctgattcagcggttcgccacggaagtccccgctgcgctgttccgattcggtgtaggtgtagttggcggctagcgaaacgctcgctgtgatgtcccagtcgaaggtcgcctcgacgccacgcatgcgcgcctcgtcgacgttcacacggtcactgatgaagcggtacgcctcgccattgaccacgcactgacccgacgcgttgccggtggtatccgagcagcggcgaagctcggtgatcttgtcctcgaaatcggtattgaacagcgtcacgccggccgaaacgccgttcaggccgtcccagagcacaccgatttcctggctgaggctttcctcgggcttgagcgaggagttaccgacgatcaccgcgggatcgcctcggccgccaccggtgatctggccccagttgtccaccgcggcgcgaatgtccggcgagcggtacccgctggaaaccccacctttgaccgtccattgctccgttgcctgccacacgccgtagacgcgcggagaccaatgggtgccgtagttttcatcgcgatccatgcgcaggccggtggtcagtgcgaagctgtcggtcaggctccactcgtcttcggcgaacagcgcccaggaccagcgcgtcaggcgggtcaggtcctcggcgccggccagttggttgcccttgtcagaaaggtcctcgtacttgtattgcccaccgagggtggctacgtggtcgcctagaaagagagagctttgcgtattgaagacgctgttttccaactccatctcgcgtcccgggttctcgatccgctcctgctgcagataggtttccgattggccggaatcccagcggccggtgtggctgatggagtagtgcgtgcggtcgtaatccgacagcgaatcgctgttaccggtgccggagcggttcaggctggcgttgcgttcctgctcggtcttgcccacttccagcacgaggtcattggcctcgttgggtgtgaacgacaacttcgccgttgcgctgtcggtcttctgctgattgaacccgcgagggatgtcgtcttcgtctcggcgagacgtctgcccgtagacctgcagcccgagcaggccgtcgaccaaaggcccggaaaggtagccgttgatgctgtggtaatcgccggaatcggaacggtcctggaaggttttttcagtccgtatgccgccatgccaggtgtcggccaccttgcgcgtgatgatatttatcacgccgcccatggcatcggagccatacagcgaggacatcgggccacgcaccacctcgatgcgctcgatggcttccagcggcggcgtccagccttgctcgatgccggggccgtcgctgttggggcgcgtcgcgcgcgattccatgcgtttgccatcgatgaggatgagggtgtacttggacgccatgccgcgaatgctgatgtcgctggagctggcgccgccggtaatcacgacgcccgggatgtcacgcagggcatcggtgacgtcgcgataggatttcttttccagctgctctcgcgtcactacggagatggaggcaggggcctccttgatctgctgctgaaagcccgacgcggtcacgacgacgttcgataactcgaccggctctgcggcgctgaccggcgtgctcgcccaggttgctgcagcaatcgcacaaaccagccgacgtcgattgaaagtcaccatgtactgccgtctccctgagaaacccacattgtctgcggccgatactcaccgcatgcccacgcgcaccgagtggcgtacgtggctggcaatgctaagtattctcatttgagagtaaagcgcatttacaatctatacactttgcaggcgtatggtcattcgcaggccggtatcgccgttttcggcccagagggtgccgccttgcatccgcaccatcccgcgagcgatcgccaggcccaggccaaagccatcgccgccggggcgggcggcgttgagtcgcgcgaatggcaggaagatcaccggcaaccgatccgttggcacgcccggcccctgatcctcgatacacaaccgccagtggtccgcgtcgcggtcgacggacaggcacaccgtcccttgagcaggggaatggcgaatggcattgcgcagaatgttctccatggcctgcgccagtgcgtttaggttgcccattacctggcaatcttccgggatttgtgcgcggatgcgttcgcgcggccagccggcttcaaagcaggcgttttcgctgattacgtcccagagcgccgcgacgtccaccggctcgcattcgaagcggggttgttcactgtctagccaggcgtactcgagggtgctgtcgaccagttgctgcatgcgggtgatctcgcggtcggtccggctgcgcagctcttcagcaccgagatcgctctcgcaggccacgcgcaggcggctgagcggggtgcgcagctcatgggaaaggtcacgcagcagctgctgttgctggctgatcgaatcgcgcaggcgctgggtgaggtacgccagcgagcggcccagctcgccgagttcatcgtggcgccgggcaatggcgggcggcaacagcgagtcgaggcggttgccgcgtagcgcgttggcctgtcggcgcaggctgtccaatggggacaccagcaggcgatagagcaaccagcagaacagcacggacagcagcaccggcggcaaatacaccccgctggccctgagcaacgcatagtggcgccacgggcggaagcgttccggtagacgcatgaccagccgggcaccgctgtcagcgatcgggatggatatcagcggcaggctttcagaacgacggctcatgggccattcgtagtgccgcacgaacgtgagcgtctggcgctcctcagccgtcagtgtctggccgccgaggggttgcaactgctcatcgaccacgaccagccagcccggctcgcgctggcgcatgtccgcgagccatcgggccagcgcttgcgggccggcttgcaaggcgtcatgggcctcgtcggcatagccggcgagcacctcgtgggcctcttgcgacagataggagctggtccggtcgatgtgacggccgacgtagccgccggcccagatcattgccaggcagaagcccgcgaccagcaccaccaggcgccagaacagtgaatgacgattgggcatcaaccggcctgcaggtccagcacgtagcccttgccccacaccgattccaggcgcaaggccgccacctgttcgcgcgccagtttgcggcggatgttgctgatgtgcatgtccaggctgcgatcatgctgtgaatagccgcggcgcagcgcctgctggtagagaaatggcttgctcagcacctcgccagcggcgtcgtgcagcaccttcatcagccgatattcggtggcggtcaggccaacccagcgtccctcgtaccgcagatcgcagcgttggtcgtcgaagcgtatcgcgtcgttgttggccgccggcggtgcgctgcgctcataggccacccggcgcaggatggcggcgatgcgtacctgcaattcctcgatgctgaagggcttgggcagatagtcgtcggcgccgctgtcgaagccctgaatgcgatgcgcctcgttgcccagcgccgacatcatcagcactggtgtgcggcgctgcgcccgcaaccgggtcagcagctccataccgctgagttccggcagcatgacatccagcaggatcaggtcgtaggtcgaattgcgcgccagtgccaggccggtagaaccatcgccggcgagcgtcacgtcgaaaccgcggttttccagggatgttttcaggtgcggtccgaggatagggtcatcctcgatagccagaagccgctgagctgcgcaagttgccaatggagggctccgctgcaaataagaactattatagattggatgtaccgccccacggcaagcgggcgcgacaggtagcgtttgccgcacgggctcgactttcggggcacgctgggtgcatcttcagcgtcccgccaacctgttgctggagaatccccgtgcgcctgctttcgtcttcgttgtttctgatggcactgctcggtggcggtcgccttgcgttcgctgccgacgtgggaggggaggcgcagctgatcgactcgatcaatgcctatcgcagcgaggtgcagcgctgcggcaaccgcgccagcgaagagctgacaccgcttcagtccgactcgcgtctggtgctgccggcaaccggtgccggcgatctgcagggcgcgctggcccgtgccggttacccgatggttaacgtgcaggccatcagcctatccggtccgcgcgatgcggcggccgccatgcaggcgctgcgtgaaagcttctgccgtgtggtcctcgacccgcaatacgccgatatcggcatcagccgcgccggacgcgattggcgtatcgtgctggcacgcccactgatcggcggctacctgaaggactcccagaccgaaggccagaggctgctcgaagaggtcaaccgggtccgcgcaaccgcgcaccaatgtgcgggcaaggcctttgccgccgcaccgcccttgagctggaacgcgacgctcgccagcctcgccgaaagccatagccgggccatggccaacggcaacttcttcggccacctcgaccgtgaaggacgcacgccaggcgaccgggcggagctagccggatatcccggtgccccggtcggccagaatattgccgccgcgctggatcggccgcggcagatcgtcgaaggctggctggcaagcccgggtcattgcaccaacctgttgaatccgcggttcagcgaactgggcgccgcctatgcggtggatccgcagagcgatgcggggatttactgggtgggtgtgtttggcgggcagtaagcgaacattggtgcagctcgccgttccaatgagcgaccactccggtctttccaccgatcgtgatgaggaactctgacatgaccgatccaaaagatccgctcaaggacggcctgacgccgccggattatgacgaatacggcgatgcgcccgagtcgggcgagaatgccgagccgaaaaaggaaggcgatcccagcagcgaaccgaatccgggggaaagcccgctggggtaggttcgcaacaagatcccagccgtatttcccgggtgaagggaaggcaactcgctggacaatcccgcgctcgcggcctacaaaggcgcgcgttgagttcagggtagagacggcacgctcccggagcgtgcccaattagcgagaggcagtggaaccgtgagaaagaagaaacccatagaccccgttcgccaggctgaaaagaaccgggcgcaccggatcggctggatgattgccctggccgggatcgtggtggggttcgtgctggtgctggccaaacagccgtgaacgggcggagctgctcgtctgagcggcctcgttccgggcctgtaccggtatcgcgactggtagctgtgcctactcgccgatccgcgatgccgtgagaatgggccggtccccagcgccgagccttgccatgcatatcgccattctgaccttcgacgggttcaatgaactggattcgatcattgggcttggcatcctgaaccgcgtcaggcagccgggatggcgcgtctcgctggcgtcgccgagtgaaacggtgacgtccatgaacggcgtgagactgcaccgccaagcgtctctggatgagatcgattcattcgatgcggtgctggtcggcagtggtatcaggactcgcgagatcgccgaggatgcaagcgtgatgcagatcctggcgcggctcgatgccgagcggcagctgatcggcgcacagtgttccggcacgctgatcctggcgaaactgggactgctgaacggcgtgcccggctgcaccgacctcaccacccgaccctgggtacaggaagccggcattgaggtgctcgagcagcccttctttgcgcgaggcaacctggccaccgccggtggctgcctggcttccatctaccttgctgcctggaccctggcgcgcctggtgggacgcgatgcggcagccgaggcgttgcactacgtcgctcccgtaggggagaaggcggattacgtcgagcgggcgttgaacaatatccagccttatctgccctagcgccgaacgacctgccgcgtggccttcacagcggttgcgcggtatggtgcgagccgacctcgccactgatcgaaagccccgccatgagaaccgacagccgcctttcccgcatgctccacgtcctgctgcacatggcgcgtgacgaacgcccggtcacctccgagcagatcgcgaagatgctagggaccaacgcggcggtcgtgcggcgcaccatgacgggcctgaggcaagccggttatgtgcgcgccgacaaaggctacaacggaggctggagcctgtcggtcgatctgcagcaggtcacgctggtggatatcttccacgcagtcggcggcccgcgcattttcgccatcggcccggaccgcgaaaaccccgattgcctggtcgagcgagtggtcaactcggcgctcgaagacgccttgcaacaagctgaagccttgttgctgcagcggctgggttcgctgaccctggccgacctgtcgaaccagttcaacgcgctgtacagcacctgccaggcaatgcccgccacgcataaacctcactgaccaatgcttatctgacgattcatcgaaaggcactttcatctcgtgcgattattagtgtaactttaaaagatacataaatatccgaagaggtgagagccatgttctacgacgtgatcattatcggcgggagctacgcgggattgtcggcgggacttcccttggcgcgagcccgccggcgggtgttggtgatcgatgcaggcctgcgacgcaaccgttttgcggcaacgtcccatggttttctgacccaggatggtacttcccccgatgaaatagctgccgaaggccgcgcgcaactgatgaactatgcaaccgtcgactggctgtatgccgaggcggtgcgcgccgagcgcgacgatgagggcttttgcatcaccgatgggcgcgggaaacagcatcgagcgcgcctgttgattctggccaacggcgtcgtcgacgagctgcctgcaattccggggctggccgagcggtggggcaagcaggtgttccattgtccgtactgccacggctacgaactcgaccagggccggatcggcgtactggcgacatcgccgctctcgatgcatcaggcattgatgctgccggactggggcagcgtgacattgctgctcaacgaggtgttcgaaccctccgttgaggagctggcacagctccaagcgcgaggtgttgcgctggagcgcacccgggttatccagctgaaagaaggcgagccgatgaacgcggagctggcggatggccgccagttgccgttcgacggcatcttcctcgccccgcgtatgcgcgtctcggcgctggtcgggcagctggggtgtgcaatggaagagggcccgctcggccccttcatcaagaccgaccccactcaggcgacatcgattcccggtgtattcgcctgcggcgatgcggcgcgggccgcgggctcggtacccttggcggtaggcgatggcgcgatggcgggtgtcggtgcgcatcgggcgctgatgttcggaatctgagggagcagagttgcggagcgttgggtagggaaaactcgagtcgctttctacgattcaacgggccggagccgaaaagaaagcaggagccggcggaggcgttcccatgccatgcatgggaacgctcgactgcgtgactgtcaggcgaagacgaaatacttgcggacggtctcgacgacttcccaggtgcctgtcatgcctggttcgactacgaagatgtcgccggccttgaggtggatgggttccatgccgtccggcgtgatgatgcagtagccttcctggaaatggcagtactcccatttgacgtactccacccgccacttgccgggcgtgcagatccaggtacccatgatcttgctgccgtcatccgaggtgtaggcattgaggttgacggtatgcggatcgccttcgattcgctcccatttgcaggcatcgacgacaggcatgggctgggtatcgcgcagtacggtgatcgggggattggccatgggcgctcctggtgaggcgaaaaggtcacccaccatagagcggcgttacgctggccagatgtctgggttcgacacccggatactcatctgcgctgtgcgcggcggggaaactcgcaccgcgcagtgagtatttgccacgaagcttcgcctggcttcgatcagtgggcgatacgcgttttcctaaacgcgaaagcggctgaccatcgcctgcaactcgccaccaaggcgagccagttcgacactcgatgccgcggtctcgtcactggccgtggcggtctgctcggaaatgtcgcgcacattgatcacgctgcggctgatctcttcggcgacggcgccttgctcctcggcagcggcggcgatctgctggttcatcgcctggatgttcgagaccttggcggtgatatcggtgagcgccaggccggctttgcgcgtgagttcgacactgctttcggtcaggttgtggctgttctgcatggaagcggccacctgttgcgtgccctgttgcaggccggcaaccagctgttcgatctcttcggtcgatttctgcgtgcgctgagccaggccgcgtacctcgtcggccaccaccgcgaagccacgtcccgcttcaccggcacgtgcagcctcgatcgccgcattgagggccagcaggttggtttggtcggctaccgtcttgatcacgtccatgacgctgccgattcggttgctttcggactccagcttggccatggcctcggtggaacgcagcatttcctgggacaagcgttcgatctgggtgaccgcctcggacaccacggcatcgcccgcacgtgcctcgcggtccgcgtcactggccgctcgcgacgcatcctcggcattgcgtgcgacttcctgcaccgtggcggacatctcgtgcatcgccgtggcgacctggtcggtctcgatcttctgaccgttcatgccgacgctggtctgctcggtaatggccgacagttgctcggcggcgctggccatctgcgtaacgctgtcgcggataccgctgatgagctcgcgcaaggtcgccgccatgcccatcacgccttgttgcaacgcacctatttcatcatggcgctcgatgctgcgttggtcggtcagatcgcccgcagcgatattccgcacgaccgccagcgtatctgccagaggctgggtgatctgccgagtgatcagccaggcggccagcatgccgatgagcaacgccagcaccgcaacggtgacctgggtgatccgagcttggctggtgtcctgatcaagtctggcgctctggtcctgcgtcagggcgaggccgagacggttgatctcctccgtctggctcgccatttcctggcgtgccgctgcgatcgcttcggtctgggcgacgaccgctttgagcgcgaccaaatacccgtcgagcgcctgctcggtaatggccacctgagcggaaaattcttctccgagcacggctttcaggcgcgcggccgattgccgggcctgggcaatctgctgctcgaccttggcagcgacctcgacggtgggcgtcgtgttgtagccacgcatctggtagcgcaccaactgccagttcatgcgcagttcggagatcgccttgagtcccgcgtagcggttttcggcgtcggcaggcatacgctccaccgttttacccatggcgtcgatgggctcgctggcgagcgtggcatgcgtgcccatgtccgcacgggcggcagtgccggcagcataggcgtcgcgcatcttctgcagcgacgcgcgatagccctggatctgctcgccttgcttgcgcaggcgcgccacattctcgggaccggagaagtttggtgagatctccgcgagccgtgctgcaaaccgatccagcgccgcattcacgacctccgctgatttctcgtcgccgttgtcgagcatgtattgcaggcgcgccgctctcagctcgcccagcgattcgttcagcgaagcgatctgcgccatcagggcgccgcggtgtgtcacgctgcccaggctgtgccagccatagacggccagcgcggccgtgagcagaagcaccgagccgaagccgatcgccagcttgcgggtcatgctgatatcggcaaaccagttcttcattagatgtttcctcctgtccataagtggtttccggcgccgataggtcctgccattgccctaagcgcagaggcagggtgctgcccggtgccaagcaccgggctatcgcggggtcagtagacgaacgtcagcagcgcgttgaagatcagggccgcgacgaagccaagcggcgcggcacgaaacagcagctgcgggaacagtgaagtgcggctctgctccgtggggcaggagccgaggatcaggctgccgccggaggagaacggcgagatcgaggtggcctgcgcaccgacgacgatggcgatgaacagaatcatcggatcgatcccgagcgccgtggcgatcggcggcaccatcggaaacagcgccggcgtgacgaccccgagcgtgctggagaacagcgacatgaacgccgcgaccacgccgaacacgatcggcaccatgatcggcggaatgctgttgcccatccacgacgccagcacggcgatggtgccggccttgatggcgaccgaaataagcatgcccacaccgcagatcatgatcagcgtggcccagggcaccgaggccatggccttgcgctcatcgcccagcttcagcagcagggcgatgaccgaaaacaggctggcgatcaggccgatatccatcttggaattgatgaagctgaccgtcgcgttgtccggtagggcgatatgtgcgatcggtgcggccagcacgatggccatcatcgccagcgtcagccacagggtgatcttctgctcgcggttcagcggcgttggctcggtcgccacataggccgatgccttcatcgctttgccatgcccggtcaggaacaccagtgctgaaatcaccagtagcgggatcaccagcgtactgacgaagatgcccgcggcattgatgaaggcatcgttctccgggatgccggcgttgaccatcaggccgcggaagatgatgccgctctggctggaaacgaagttggccccgctcaaggcgccgtagttcaccgccatcccgccagcgatcaggctcatgccggtacgctcgcaaagtagcagggtgatcggcgccatgaacgccagcaccgtgtaataaccggcgcccatcgcggagattaccgtcgcggtgaagaacaccgcgaacggcaacagctgcggcaccgatcggcagtgatagatcagatgctcggccagcttctccagggtgccgttgaccgtggcgaaactgtagaacaggcagaccgagaagatgatgaagaagatcttcagtggccacatgctgatgacctcggacgggctgaggcccataccgaaacaaccgatcaggtaggcgaaggcgatggcgaacagaccgatgttgatcttggtcttgtagccaagggcgacggcgacaacgattgccgcgaccacgagcaggctcatcatgatgaaagtcctattgttgttatgaacgtttagcgggaaacgccgaagccgaacagcttcgccgggttatccataagcacctgggcgcgctcgcccgcgtccggcagcagtgcctcaatgaaggcgacctgccggtcgtagtcggtgtgatcttcgaactgggtgttgggccaatcgctgccccagaggaatcgctcgatgccgccgctggcctcacgcgcctgtgccagtactcgcgaggcttcggccagccctgaatggctgcggtagggcgccgacaacttgagccatacgcgctcctctgcgagcaactcgaggaaggcctggtggctgggcttctggacatcgatgccaccattcggcaggccgaagtgatcgatgaccacccggacgccgcacgccaggatcgatgccgcaaccaacgccacgtcgtcaatgccgcgctggatttcgacttgccagccacgcgacgccagccgcttgaacagggcctgccagacggggccgctgtagtcggtcaatgacttgccgatgaggttcaggcgaatgcccaccacaccggcctcggccagttcgtccagctgcgcctcgctgatctgtgcatcgaccaccgcgacgccgcgcaggcgctgcggatagcgacggagcgcatcgagcatgaactggttgtcggtgccgagaaaactcggctggatcagcacgccgtgcgacagcccgttgcggtcgaggtgctcgaggtattgctccacccgcgcatcgtaatgcgggctgtaacggcggtccgccgccatcggcaggtcctggcggaagatatgcgcgtgcgtgtctatgccagtgagggtgggcggttgaaggccggtcataagcaaaataaccctggtcgattgttgttgtgacggtcgcctttacgtcaggtcgcgaaacgcaaaccgaagctcgttgtctattgctgctgacatctagtcatatatatgaatagatgaccatatatgcagcggtggatatctgtcaatcgaagggacggtggtagagtgattgcgctgaagaccaggaccaataaaaagatgaatgcctcgacactcggatacgacgagcgcttgccgctctatcagcgcctgcgggaagaaatgctggccaagatcgcggctggcgagtggacgcccggtgcacccattccgaccgaagcggaactgaccaagctctatggcgtggccatcggcacggtgcgcaaggcggtggatacgctggtcaacgaaggcttgctgttgcgcagccaggggcgtggcacctttgtgcgccggcccaacttcgatgcctcactggcgcgcttttttcggcaggtcaacgccagcggcgggcgcgaaatccccaccagccggatattgtccaagacgctgcaaaggccgtcgcagcgcgtcgcgacggcactcgatctggaagagggcgagcaggtcgtgcacatggaacgcctgcgcatgatcgaaggccgcaccctgtttcacgaggaaatctggctgcctgccacgcgcttcggtgcgctgttggagatcgattccgaacagtttggcgaattgctctatccgttttacgagcaacagtgcgggcaatgcatcgcctcggccaaggaaacccttaccgtcggcgctgccgacagcgccatggcgaaaaccctgtcgatcgacgagggcgcaccggtggtcaccatcgagcgcacggcactgggctacgaccggtctgcgctggaataccgtatctcccgcgcggcgggcgagggcttccgctatcaggtcgacatttcctgaggcgggcccaggcaagtcgggctaacggtcgatgcggtgtgccagcggcgcttcatcgtcttggcaatccaatcgacccgtaaccctgatcgcacaccttgggtgctagacctgagcgccaaccgccgctttatcgatcactgaccaaacgtgccgaatcttcccgtcttggaattcgtagaacacgttctcgctgaaggcgaccctctttccattgaccggaaagccgaacagcgtgcctgccggcgtgcagtcgaacagaagccggcacgccacacgaggcggctcggctaccagcagatccatgttgaaacgcagatctggaatcgcccggaaatcgtcctcgagcattctgcgataaccgtccagcccgactcgttgaccgttgtactgcacctcgtcatcgacgaaacggcccagctccggccagttctggtcattcaggcaggcgatgtagtcgcggtagcgatcggtgagctcggcgccggtcatggttgtcctccaggttgcacgtgagtcagccatacaggctagttgccaagcctgtaaccgccaacgggccgggtctcgaagcgctcgccgaagccggtaatgagcggcttgccgcgcgagatggcttgctgaaccgagggcaatgacaaagatgcttgatggctggcttggctatcccacacctcagtcacccagatggcgtcaggatcggtcgggtcttgcgctaccacatagctaaggcaacccggcatgccgctgataccctcgatgaggatggaggccagcgcgtcacgctgacctgacacaacgttaatctttccgatcaggccgtacatgttcgtgctcctcagtggggtgcgaacgactgagcctagcagagcggcggggcggcgacagcgacgctggtatgtctacgtcgttggctatcgctgccgcacgaaccggcaattcctgcacgaacgatcattcgttcctgaccagccgctcgaccgcgcgacgggccagtggcgtgaccagcagcaccgccggaaaggcgaacaaccaggcggccagccatgcgctgatccagagcgcgaaaaagccgggcaccgggcctgtcgcgcgcagcgtcgaaataccagacaccatcagcgacatgaacccggagagcagcagggcgaacaaaaatggggcgtatcgacgggcgatcatgggcgtgcctccagctgcgcttcggtgcctggcaccgggccgattccttcgatgatcgttcgggcgatctgcgcggtgtggccatgggcgctgtggtaggtgactgcgatctgtgtcatggcgtgctctccaactgcttttcgtgggtaagaaagtggctcgttcatttcagccagctggcgagcgcgacggcggacaggtacaggccgagtccgaacacgccatgattggccaggctgcgcaggcagttcttcagtggcgtgggcgtccggcgcgcggcgaagccggagcccatggcgggctggataaggaacagggggacaatgacggtggcgagccccatcgtcagtgccggcaacagggtcggttcgaacgcccatgcgctgccttgaaaggcgagcagcagcgcggcgaaggcgattccggtggcgtagtgcaacagccagccgagagccagttcgcctctgatgggatgcgacctggcgattgccgcatgcctaagctgaccgcgcagcaaatggccgccccagcgcccaatgaaagcgaagttgagtgtcgtcacacccagacggttgaggaccatcaaccaaaggtccatgaccgcggtggcgccgataccgaggccgcaggccagaatgagtgagtgcgtcagtgatgtcatgaaagcctcccgctgattgaccgattggtgtttcggcgcgactctacgagttcaagtgaacttgaggtcaaggggctcgctcatggatatttcagacgtggccaggcgttccggcgtagcagcgtcggcgctgcgcttctacgaagaaaaggggttgatcgcctcgctcggccgaccgggcgaacggcgccgtttcgcgccgcaggtgctcgatcagctggcgttgatcgcgctcggccagtcggccggtttcacgcttgaggaaattcgcgcgatgttcgcgcccaacggcaaaccgaacatcgaccggtccatactggcggccaaggccgatgaactggacgcgaccatcagacgccttcgcgccatgagcaaaggcctgcgccacgccgccgcctgcccggcgcccagccacgccgaatgccctaccttccagcgattgctgaaagcggcggtgccgggaacgctcaagcgcgggcggagcaagcgcgccggtctcccggagaggtgatcgacaggcgcgcggcaccaagtgcgcctatgggccgccctacggagcgctcatccggcgccgacaagcggagcgggaagagctgtgggagaacgctccgaccagcgtctggcggacccggaggaatgagcgcctcaggcggtgtcatcctcggattcgggtctgatatcgaagtgcagcacctcctcgcgagtgcccaacttggtgtacagcgccacggccggttcgtcgccatagtcggcctggatgaaaatgacataggcgcccatctccctggccaggcgttgtagcgcccgtatcaatgccgtggcgacgccgaggcgcctgtgcgattgcgcgaccgccaggtcgtagacgtagatttcgcgcctcgactgctcgaatttcggcagcacgtaggcggccaggccgccgatgacgcgatcgtcctcgaacgcagcgagtgcaacgaaggtattgctagacaggagatccgccagatacggcgtcgagggctggtgctcggtataggtgggaatgtcttcgaaagcctgcccgaacatggaaagcatgttgcgcatctgcggcacatcattcgaggtgagcctgcgcacgctgatcgcttgggtcatgtcgcccgtcctatgtcgcctgacgttccgggtacggcccacgcgagccgggaccgtaaaaatatatccatctttctcgctcagacaatagacctgccgttacctggctcaagacccgccgcatgcgatggtccctggccggcatcggcggaccacggctggtctatttcatccgctctaacaaggggagtgcagtgcggcaggggagagcatagatccaaacagcacttttaaagcccgggtgcgtgatcggacccgctgcccttcgaacgttgcgtggtgatagttattcgcatatacgatcgatttcaattgaacctataattcgcgacgttttctttgaggcggcctgttcatgggcgttcttgaattccttcattacgtcgtgatcgcaccggtcgtcgaccagttcaccaagatcttcgatctcaacggccgcatcggcgtgctgtttctatgcctttcatacgccgtggcctacggcctgtttcgctaccgcaaacaacgcgggctgaccgatgcgggctcgttctggcagttcatcggcggcaacgcggtgcattggcatccctcggcgctgctggactatcgctactacctggtgcgcggcgttctcaaagtggctctggtgatccccatcgtcggcctggtggatccgcatgtcctgcgttcggcggactacatcggtttctacaccaacctctggggcgcacggccgcagctcgggcagacgctgtggctgtcattgctgtacgggctgggcgttttcctgatcagcgacttcacccactactgggtacaccgtgcgtttcattgccgctggctgtgggcgtttcacaaggtccatcactccgctccggtgatggtgccggtgacggccagtcgcgtgcattttctggagaaggtcgctggcaagctggccgatctcatctttctcggcgcctacgccggagcgttctggtacgcctgtggcggggaaatcagccgctacaccctgttcggcgtgacctatctggtattcgtcttcaacgcgctggcatccaacctgcgccacagccatgtctggttgtcgttcgggccgcggctcgagcacgtgctcaacagccccgcgcagcaccagatccaccacagcgatgcgcccaggcatttccacaagaacttcagcaccaacctgtcgatctgggactggatgttcggcacgctctacgtcaccacgcccaagccggaagagatccgcttcggcaccgccgaacaggactcgcaccgctacctgaccctctacagcctggtcgtcacgccgttcgtggatatcgcccgccaatcatggccggccaaacgaccgctgatgccccgggagagggcgcccgaagcgtgacggcagtggatcaacagggtttgcgctccgctccaaagccggggccggagcgggtgttgttgcccttggccaggcggtcgtaaagcaccacgtttaccgtcgccgcgaggttcatgcagccgttggtggggatgtagaccacgtcttcgcaccagtcgcggatctccttgctgagcgagccgtcttcggcgccgaagatatacagcgcgcgatccggatgcgtgtattcgggaagcgcgcgcgcaccctcgaccagctccacggcgaccggcacgcaaccgagcggcaggatcttgcgcaggtcatcgatgttgatcagcggaatatcctggtagaccttcttggtgtcggtgatgaaatccttggcgcggtcgtagcgggtgccggtgtagaacaccgaggcggcgccatagcagcccgccgcacgcatgatcgcccccacgttggagggcgatttcgggttgctcaagccgatgcaggcatatcgtttgttgctcacaaggtgaggactcgtgcggaaaacgcgcgagtatacggcacagccctgtcgtcggcggttcgggagtaccggctccgatcaggggatgagtttgctggcgcgcaacgccgagaatacattgaagaacgcctcgtcactcgcctggaaatccacgaagcccagctttcggctcttcgatatgtccgtcacgacctcgatgggccgcccgagatcggcatcggtgtgccacggcgagatgagtttgccgatgtccgcttcggccaggccgaactgcttcgagatgtctttccagacatccgcgtcgcccgccatctgctgttccagcggtgcagggccgtcgaacggagccgcttcgatgccgaaccactcggcaatgcgcgaccacatccattgccagcggaacacgtcaccattaacgatattgaacgcctgattggcggccgccggcgtggtcgatgcccagcgcaaatgctctgcgagctggcctgcatcggtcatgtcggtcaggctgttccactgaacttccgagcccggaaagcggaatggtcgaccggtgaagcggcagatcgaagcgtatacagccagcgttgtcgccatattcattgcgttgccgaccgcgacaccggtgatggtatgaggccggtggacgctccaggtgaagccgtcacgctctgctgccgcaaacacctcatcttcttgggcgtaatagaagttttccacgtccaggcgaccctgttcctcccgaaacggcgtttgtggcagagagcccttgccgtaggcttcgaacgggccgaggtaatgcttgagaccggtgaccagcgctacatggcgtaccgagccggcaggacggaccgcttcgagcacgttgcggaccatctgcgcgttgacgcggatgttctccgcctcgctggcctggcgcgcccaggtagtcaggaagacgtgggtgggcgcgacggtgctcagctgcgatgccagcgtcgacgggtccaacaggtccgcgcttatcggcgtcacgcccgcttcggcattcggccgccgcgccagtccggcaaccgcccagccttctttggccagcaggcgcgacaccgcgctgccaacgattccactcgcgccgaccaccagtgcttgatttgtcatgttcagacccccacaaaacgaaacaggcttgcaccttacccactcgaaaattccgatccaagtcggcaccaaatggtaaccatcccccatgcaaccgggctctgacgaagaacaatggcgcgaagactgtgcgccgcggcgcgtgctcgagatcttctcgaccaagtggaccagcatggttctgcacacgctgcatgcgcggcacgacggcatcgcccgcagtggcgcgctgcatcgaagtctgccgggtatctccaagaagatgctggtgcagacgctgcgcgaactggagtcgagcgggctgatcgagcgacatacgctcgatacggtaccgcccgcggtgagctatgcgctttcgcctctgggcaagctcatggtccagcctatcgagatgatctacgaatgggcgaggcagaactcagctgccctcgatcagctgcagccgaggccgacgtcccgcaggcgtgggtaggcctcggtaaaactgcaccggcttggagcagctgaggcccgatcttgagaacgactacccggagaaccgctcatgtcactgcccttactgctccgtagtgcactcgccctggcggcgtcagccgtctatatcggccatcgcagccgcaagagcgaggaagatcatccgccgacaggccgcttcgtggaagtggacggcgtgcggctgcactacatcgagaaagggcggggccggccgctggtgatgttgcacggcaacagctccacggccgccgatttcgagctcagcgggctggtggacatggcggcagcacggtatcgggtcatcgtgttcgaccgccctggctacggttacagcgagcgaccagaagaccgatgctggacggcgaccgaacaggcccgtcttttcagtcaggcctttgcggcagtcggggccgagcggccgctagtgcttgggcattcctggggcgccatggtggccgttgcccttgggctggatttcccagaggccatagccgggttggtgctggagtccggctactactacccgagtgttccgctggcgttgccaccgtcaattcccgtcattggcaacgtgctgcgctacagcgtttcgccgctggtaggccgagccctgtggccggttctcctccggcgagtattcgctcctgcgccggtgccagagcagttgcaaaactttccgatctggctggcgctgcgcccctcgcagcttcaggcgagcctggcggaactggccctgaccaacgcagtggccgaggcactgggcaaacgttatgggcagctggcggtgccgacgctgatcatcgccgggcgcggtgatcggctggtaaacaccgaaccccattcggtgcgcttgcacgccgaggtgccccacaccgagctacgtatcatcgacggccagggtcatatgctgcaccacacccggccggatgcagtcctcgaggcgattgaccgggtagcggaaaaggtcgatgggcagcgcgatgcgtcttctgatgacaggaagggtgtcacgccctgaggagagaccccgccactggggcggggggcaagccatagccagatccaccagctgtagtgtgctggcgtgctgcgttcggctggcgtgacggttacggcagcgaggcgtcgctagtcgagtaccacggcgtggccttcaagcggattgatgttgcctttgatcagcgactcggccagcgattgtgccgcttccagaccggcatgctcgttgacttgcatccagggctgctgcgcatcgcttacccgagcgataaacgcgagctgcgcctcgttgaagcggcgggttacctcggctgcgccccaatcggcgttgcgtttcttgatctgataaggcgcgaaatagggctgtggctgaggaccacttagcgcctggtcgggttttgcatagtcctggttctgtgccgatccggcataacagtcatagaccagcgaatccttgaaatgcgcgtggacctgctgccgaagtgtggcgctgcctgagaagtccatgtagagcgtcggtacgctcgggtcaagcgagccgagctgatcgtagctgagcgcttggcgatagcagccgagggtttgtacgaagtcggtattaccggaggaggtcaggccgatcacctgcacggccgggttgtcttgcaggcagaacgccgagccgtacgccgtcttgctcgatgcgctggacatcacgatctgccgcgcaccgaagaaggcgttgtcgtccagaaagtccgccagcatgaacgaggtgataaacaatgggcgcaggagcatctggtagttctcattctcggctcgataggccgcatcggtgctgatgcgttggtattggttatacgccgatgtcagctccagtcgatgctccgcaccgtcgtagaaaccgcgttcggacacccgcaccggctgcatgacgatgtggctggcgatcggccagaagccatagaagcgctcgctcttcgccaggccttcgacggtgctttcaacgacctccgcgaatccccacgcgggcatgtgaaaccagtcggcatcgccggtcggaaagaagtcccagtagcgcaggtgaggggtttcgccgaacgctgcgtaggtgacgttgttcgtggtcagggccaggcggccgatacgcagcagggcttcgccggcctttagttcaggcatcggctgggtctgaatgcgggtctgttccatgtctttcttgttgttttgcaactggcggatgacgctcatcaatggcacctttgcttggtagtcgagtacaccgactctagcctttccgttttaccgccgggttcggatttcatgagcaaaccattgccgagcgccaagccgctcaagcggcctactcaagcgcgcgccaagtttactgtgcaggcgatttacgacagttatgttcggatctggcagcgagatggctggtctcgcctgactacccgagccgttgcgctggaagctggcgtggccatcggcaccctttatgactacttccccagcaagcaggcgctgcattcgggatacgtgcgctattgcatcgagcaattgctggaggcgatcgacgaacaggcagtaaagccgactgcgattgcctggaccgtgcgcgtccagcgcttggtgcgaacgcttgctggcgttgattcccatctgccctggtttcacccggacatgctcgaactggaagcactggttgccgagcccaagcaccagcgccgggtatacgaggacctgttgggcgcctggcagcgagtgatcgatgcggcgaccgacctcccggtaaagccggacgccgcaaccctggaggcgctgcatctttctgtctggggtgggcgccgctacgccatgctggtgcaacttgagccggcgcgtatggaggactgggctggctgcatggagcagctgtgtctgcgcacgctggaaggcccgagcggctcggccggatagctgtcagtaatggctgaaggcggttaagaagtggcctgcggctcggcgcgttgcggacagccggccttttaggcagccgctcaagactacgtcctcgcacctgaacctcatctcctcgctgagctagccgttgcgaccatcttgcctttaccgcgaaacgcgacgctcactggcaattggccgtcgcttttccggctaatggcgccatcagatagcccgtaagctcaatcgaagcgcttttcgcatccggctctttcaaggcgggcggactttggccgcaggctacgcaacgcccggatcgcgaagcgacattgccagccaccgaggacagaaacgtgaatacgactgcgacgcgtgcttgtacatggaagacaatggctctggctgtctgcctggggcttggcctgaacaccgcaatggcggcgccgaagctggatttttccagcgagtacaacgccggctccatccacgtcgaaggggacagctacttcgtccagcaggtcgaggaactggctggtgacgacgtggacatcaccctgcacatgggcggcagcctgggctacaaatcgcccgatcacttctacgccgtggcggacaacgcggtgcagatcgccgataccctggcggcgttcttcggtggggtggacccgatcctgctgctgtcatcgctgccattcatcgtcgacaacatcgacgaggccaaggcgctgtacgacatcgcgcgtccggaatatgaaaaggtcttcgccaagaacgatcagatcctgctctattcgtcgccgtggccgcctaccgggatctgggccaagaagcccatcgtgtccgccgaaagcctgaagaacctgaaaatccgcaccttcgaccgcaccggcacgcaagtcttcaaggaagccggtgcggcgtccatcagcctggcctggggcgacgtcgttccgcaactggcaacgggcggcatcgaagcggtgttgacctcggccgacctcggcgcggctgccagcttctgggagcagcagagcgatttcagcggcgtgcagtacgccgttccgctgaacatggtgcacatgaacaaagaggccttcgacgagctgtccgagaaggcgcaggcggcgatcctcgaggcggccaaacgcaccgaggcgcgcaactgggaggcggtgcgcagccgcgtcgcggccaactacgaaacgctcgccgagcacaaggtggcaatccacgacccgatcccggccgacttccgcgaattcctcggcaatgccgccaagcctgcagtcgccgagtggctggaggacaccggtgagcgaggccagcaagtgatgtccgccttcgatgcgtggaaggccaagcagtgatccagaccatggcgcgtctgtcgagcgggctcaaccgcctcggcgccggcgtcagcatgctgatcatcgtctatatgctgggccacatcctcaccgaggtggtgctgcggctgttcagccagtccacctacgtgctcgacgagttcatcggctatgccgtggcggcgatgatcttcctcagcctgccgtacgcgctggagcagggcggactgatccgcgtctcgatcctgctcgagcgtctggcgccgcgttggcgcgggccgctggagatggtcgccacgctgggcacgctggcggcattcggcctggtggctgtcatctggttcaagggcgtgcagcgcagctatcagcgcaatctgatcagcgacaccatggcgcagacgccgttgtggattcccgaatcggccgtgctggtcggcctctgcatgctctgcctgacgctgttggtgcgcgtactggtgatactgcaacagcgcggcgactatcgcgcctaaggagcaagcatggagatgatcgtagtcgcgctgggcgtcgtcgcgatcctgctcaccaccctggcgctcggcgtctgggtattcgccgcgctggccctggcggcgattctttcactatggggcttcggtggcttcgggttcgagcgcatcggcctgatgatgtcgaaaatcctgtttcgcgcaagcaacagctgggaactcgctgcgattcccttgtttatcctcatgggcgagctgatcttccggtcggacatctccgagcgtttgttccgcggcctggcgccgttgacgcgttacctgccgggcgggctgttgcacaccaacgtgttcggctcgacgctgttcgcctcggtctgcggctccagtgcggcgaccaccgccacggtgggcaagatcaccacgcgggaactggcgagccgcggctacaaccgcgacctgtcgctcggctcgctggccggcgcgggcagtctcgggctgctgatcccgccgtcgatcatcatgatcgtctatggcgtccaggccgaggtttccatcatcaagctgttcatggccggcctgctgcccggcctgatgatggcggcgctgttctcggcattcatcatcgtgcgggccatcgcgaacgccaaggtcgcgcctcgtgagcctcgcggcgacaccagtctgcttgctgcgctggggctgctgctgccgatcctgctgctgatcggcctggtcatcggggccatctacagcggcatcgcgaccccgtcggaatcggctgccatcggcgtcacggcttcgctgttgctgctggcggccgagcggcaattgagcgtcgcgctgattctcgatgcgctcaaaggcacgctgctgacctccgccatggtctgcagcctgttggtggccgccgcgatgctgtcggcggccatggcctacctgcatctgccccgcgagctggcggcctggattgccgcccagcagctatcgccggtcctgctcctgctggccatcgcgctgttctacgtattgctggggatgttcctcgacggcatctcactgaccgtcatgagtctgccgatcaccctgccggtaatcgttgccgccggctacgatccgatctggttcggcgtgttcctggtgattatggtggagctcgggcagataaccccgccggtgggtttcaatctgttcgtcatccagtcgctgtccggcgagccgataggccgcgtggccatggcggcgctgccgttcttcctgctgatgtgccttgccgccgcgctgatcaccggctggccgcaaatcgcgctatggctgcctgaagtgctgagcggatgatgagggcagggtacgtagcctcttttctacctcgcggagcggcgttcccgcatgagctccaactgcgcatcggtgcgctcggtgtttgatcgaatcgacgtttagggtgctgcgctggcatcgcctgtgcgtgggtttcggtcgttaagggtcggtatctaccgctcccaagcggtgagccaagctggactcgcaagcggcttggcgttccgggttcagcagctatgacgatgcgactaggatgcagttgactcgactcaacgtgacgtcagattgccgcgctagcagccgaataaaagttttagcccgctggatggtcgccgatgaacttgctgaggaactgccgtgtgcgttcgtgctgcggtgcgcttagcagctgcctggcgtcgccctgttcgatgatcaccccgtcatcgatgaagatcgcccggtcggccacatcgcgggcgaagcccatttcgtgggtgacgataaccatggtgcgcttttcctcggccaggccgcggatggtcgcgagcacttcgccgaccagttccggatcgagcgccgaggttggttcgtcgaacaggatcacgtccggctgcatggccagcgcgcgggcaatcgccacgcgctgttgctggccgccggagaggcgcttgggataggcgttttccttgccactcagaccgaccttggccagcaattcgcggccgcgctcaagggcctggccgcgcggctctttctttacctgcaccgggccttcgatgacgttctcgagggcggtgcgatgggggaacaggttgaagttctgaaacacgaaaccgacgtgctggcgcagctggcggatcagcccttgctgcgccttgagcggtttatcggcgtcgatgtggatctcaccgacactgatctgcccgccgctgggttgctccagcagattgaggcagcgcagcagggtggtcttgcccgaaccgctggggccgatgatcgcaagcacttcgccgggggctatgtcgaggtcgatgcctttgagcacctcctggcccttgaatgattttctcaggttgcgcacggaaatcatcaggcgtcctgctcgtggcggttgacccggtcttccaggcgaccctggaagtacgccagcacgctagccagcaaccagtagatcagcgcggcggccaggtacatggtgaagatctcgaaggtgcgtgcggtgattagctgcgcctggcggaacagctcgggcacctggatggtggcggccagggcggtgtccttgaccagcgagatgaagctgttgcccagtggtggcagggcggtgcgtgcggcctgcggcaggatggcccgatacagcgtctgcgcgcggctcatgccgatactggcagccgcttcccactggccacggtcgatggaggcgatggcggcgcgcaggatctcggcggtgtaggccgccatgttcaaagagaagccgatcagcgcggccggcagcggatcgagctggatgcccagttgcggcagcccgtaatagatcatgaacagctgcaccagcagcggcgtgccgcggaagaacgagacgtagatccgcgccagccactgcagcggccagtaaccgtaaagccgcagcagggccaggccgaagcccagcagcaggccgaagaacatcccgcccaggctcagcaccacggtccaccacgcgcccttgagcaggaagggcagtgagtgcagcaccagctgcaggctgctgtcgatcattgcgtgacgtcagccccgaaccatttctcggaaagctgtttcagagtgccgtcggcgcgtagcttcgcaatggcctcgtcgatggcggcgagcagttgcgggttgcccttgcgcagggcaattccagactcctggcgagagaaagcgtcaccagccactgccagccgatcgccggttttctcgaccatctcgaaggcggccagacggtcgaccagaatcacgtcgatgcggccgacgttgaggtcctggaacttggtcgggtcgtcatcgtaggtgcggatatccgcctgtggcacgttctccttgagccactgctcgtagttggtgccgagaccgacgccgaccttcttgccggccaggtcagccgaactcttgatgctgtcggcgtcggccttgcgggtgagcgcctggatgcctgagacagtgtagggcgcggagaagtcgtacttctgcttgcgctcctcggagatggtcacctggttgatcaccacgtccaggcgcttggattccaaggcggcaaggatgccgtcccacttggtcggctggaactcggccttgacccccagctccttggccagggcgttggcgaaatcgacttcgaaaccggtcagctgaccgctttcatcctgatagttgaagggcgggtaggtgccttccaggccgaccttgagggtgccgttggccttgacctcatccagcagatcggcggcgaacaccggcgtgaacaggctggcaccgagcaacagactcagggtgccgagcaggaaacgacgacgcggagtgatgaatttcatgggaggcctctaggtgggcagggaagtcggtcaactctaagggctgatctttattcaataaaataattagaaattatctttaccttagttatggaaatatcgcgtgcgctcagagtgcccatggatgataggcgaatagcgccggggcaccaccggtatgcaggaacagcagcggaccccggccggggaaggctccgcgggcgataccgtcgagcaagccggcgaaggccttgccggtgtacaccgggtcgagtagcacgccttcctgctcggcaagcaggcggattgcggccagcgtgccggcattcggctcgccgtagcgcggggcgaagtactggtcccacagttcgatttgcagccccgtcggcacatcgacgccgagcagctcggcggtgcgttgcagcagaccgtcgaccttgggccgctgagtcgcatccgggcgcgatacggtgaccccgatcactcggctgcccggccgcgcagattccagcgccaacgccaggccactgtgggttccggcgctgccggaggcgagcagcaccgcggcgaaatcctcgccgctgcggtgcatttgctcggccagctccaggccggcgcgcacataacccagggcgccgagcgcattggagccaccgatgggcaccacataaggtttgcgcccggcgctgcgcaggcgctcggcggcggccagtagcagctcgtcggcgttatccaggttagcgacagcttcgacttcggacccgaacaggtcgagcagcaggcggttgccgttggccagataactaccctcggcagtgcccagagggttttccaacagtgccaggcagcccagaccgagcctggccgccagcgccgcggtctggcgcacatggttggactggatggcgccggcggtgaccagcacatccgcgccctgggccagggcatcggcgcccaggtattcgagcttgcgcgccttgttgccaccgagggctagcggagtgaggtcgtcgcgcttgatccagatatctcgacccaagtggcgtgacagacgcggtaagtgttccagcggcgtggcggtggcaatcagttcaaggcgagggaagcgggcgagggcgtcggtgagcatgggaccaagcttctgcgcagagataatggatcactgtagaaggcaatccagagttgcaacaagccgatatccccctatcgcctcgccttgagtgggcggcgaggcgagcacgggaaccttggcgaaagcctgcgtgtatttctgcgcagccctcagcccagggccagcagtgctggcaccgtcaacactgccgtatagaagcccatgaactgcacgccgatgttgaagcccaagaagcgcgaaaggaaaccgccaagcagccctacggtaagaatcaccatcagaccgagcaaaccaccttcccacatacctatcaccaggatcagcccgacaaaggtggcgatgaccgcttcgtggctgaccttacgcgacacgaacgatgccgcacggtgtgcgaaattcatcgagaacggataggcaatcaagatagcgacgatcacagccagcatcccgtaaccgagaaactcccagctactcatcaaggtatgcaggttgttgatttccccggtggcgctatcgaccgaaaagcgcggcggtgcattgaacagcggggcagctgggcctgcggcgaccgggctcaatggcaaaccaaaagcaatcagcggaatcagcgcctctgcgatgtaggtcgcctcggtaacgccgttgcgtgccgtgatgacggtcgtcaggcgatggtaggcatgcttgatccgtgacccgaccacttcgcccatgatcacggtcatggccaccggactgaagacgaaggtcgcactcgacaccgcggcggtggccaacgtcatgcgagtctgtcgcttgtcgagtaccttcagcgggtttgggaaatatccgccccagctcttcacatcgggcgacaaggagaatacccgaacgctgtcgcgcttcatgcgcacacgctcacccggcgacatcagcgcgaacagcgacgcgataagggggccgatcgcgatgccgagaaaataactcacgcccagcttcacgccatgctgggcagtcagggtctgcaacgcgacgatgacgaggacgaaaggcaccagggtgaataccgaggcccagcgaccggctgagaagtaggcaatcagaagggcggcgcagaggaacacccaaggtgagaactgtttgatcacgtcgccaaacggcgccagcaacaccgcgaaaagcaccgacaacggtacggcaacgagcgctgcgatcgcaccgcccgagatcattttgcgaagcgcgatatgaggcacgcccagttttcgcaagtagttcgcttcagccattaacggcgtggccatggtgtcgcccgggatgcccagcaaggcggttggaaccgcgtgggtcatatgtttggcgacagcgcccgcgagaaagaaggtgaacacaccttccggtggcaccccaagcaacaccaccaacagcgtcaacggcgccagggtagtggtttcgtcgctaccggagatcaggccaatggcggcaaacactacggcacctattagccccataccaaaggcaacaaggatctggtcgagtaggccttccatcatgtgcgccctccactcaggctgacttgctgcgctgaaagtgcatcgacagaggcggttgtctttccggtcgctcgggcgtccctggtctcagcctcacggaagaggtcgtagagagccagctcacgcagttcggctaccacttcgggaggcagctcatccagccgtccgagggtgccatgctcggcagtcagttcagcgagcacctgctgacggaaggttgggtccgccagatcttcgacgacttcgcgcttgggcttgaacagcgtcgcgctgatcacgccgcctgccaggcaacccagaatgccggtaagcatcgcgtaagctcgtgccatttgctcggactcgaccacgccgaggagcaggtgctgcgcaatgtagaaagtgccgagactgaccacggcgccaatgacgatagacgccatcaggtgaccactatcgacggtgtcaccccatacttcatagagttcgggcttcttcatggttgtgcctccagcatgggggcgaagcacagcagacgcgagtcggtcggttggtattccatcgtgtttctcctgccctgatgggcttttgttgttatcgagaaaagcgcgtcagctcggtatacggtcgcccgttcgtcctcgccttgcgttgattgcccttgctgtactcgaagcggtcatccggcccaactccctgtcgatgaaggtgccggattccaccagtgcgtgcaggttcacgccggtccgcaggcccagcccttcgagcaggtagacgacgtcttccgttgcgacattgccagtggcgcctggcgagtaggggcagccgcccagccccgaaacggagctgtcgaacacccggatcccggaatccagtgcggcatacaggttggcgaccgccatgccgtaggtgtcatgaaagtgcccggccagcgcagcgagcggcatctcggaggcgcaagcctcgatcaaggccttcgtcttgtagggcgtgccggtgccgatggtgtcgccgaggctgacttcatggcagcccatctcgtacaacgcggtgctgacgcgcactacatcggccgtcgcgatgtcgccagagagggggcagcccagcacgcaggagacgtagccgcgcaccgctacgccagcttccctggctttagtcagcaccggcttgaagcggtcaaggctctcggcgatggaacagtttatgttccgctgtgagaaggcttccgaggcggctgcgaacacggcgacgttccgacagccagacgccagggcagcctccaggcctttctcgttgggcaccagcgcgctgtaagtcaccccgggcaacggcgcaaggcaacgcatgacctcatcggagccagccatctgcggcacccaccggggcgagacgaacgcaccaacttctatgtcgcgcaggcctgccgcggcaagccgctcgatcagcctgatgcgggtctcgacgggcagtacctgcggctcgttctgcaaaccgtcgcgcgggcctacctcgacgagcctgaccgcatcgttgttcatagcccacgcttctcgttgagcagcgatgcggcacggtccgcgcgcacatccttggtctcaaccatgcgcttgaccagccaatcgacttcttcgccacgcgcaccggctgacagcgcgatgttgcgcgcatgcagcgccatgtggccgcgctgaatgccctcggtcgacagggcgcgcagggcgcccaggttttgtgccagaccgacagcaaccgcgatttccgccaggtcctgagccgttttcacgccgaggatgcgaagcgacagctgtgccagcggatgggtcttggtcgcgccaccgaccaggcccagcggcatgggcatttcgatggttccaaccagatggccgcgaccgtccttttcccaggtcgtcagcgagccgtagtgaccgttgcgacaggcataggcgtgtgcacccgcttccacggcgcgccaatcgttgccggtggcgaccaccagcggatcgatgccgttcatgatgcccttgttgtgagtcgcggcccggtaggggtcgatggcagcgaaggtgtacgcgtcgatgatgccttcgatgacatccgaacccttgtactccgcagtgtccagatgttcgggggcgatccgcacctgggcccgcgccagacgcaggtcggccaagttggacaggatgcgcaaacgcactttgccgccggtgagctcctcgatcagcggtgctacggcttcggccatggtgttcaccgtattggcgcccatggcgtcgcgcacatcgacaatcaggtgcgcaacgagcatcggccctcgcggactctcgataaaggtatgcacttcgatgtcccggcaaccgccgcccagcttgttcagcaactggtccttgctgttggccagggcgacgatctcatccttgttgcgcagcaggctgagacgggcattgtagggatcgtcaacgcccacgatctggacctgggcgcgcatcagcggctcactgctggaggtcaggaagccgccggccgggcgtgccagcttagccatgaaggacgcggcggcgacgatagaaggctcctcgaccaccagtgggatcaggacatcacggccgttgatttgaaagttgctagcgatcgcatagggcaactcgaacttgcccaccacgttttcgatcattccatccgcgatttcgatcggcagcgcgccagcatcacgcagcagggcggagtcggcgtcggacaacgagagaagtttttgcaggtgctcgaggcgttgtgaaggtgtgaggttacggaactgcgacaagcgagaatcgatggacatcaaggtgctcctgaggagtcggttgttcttggatgcgccaacgttagcctcatctgtaaccttgaaagaaggtacagtttcgcgagacagttccaggcctgtaccccatcggaacccaacatggctcgtcagacgctttcgcagaaggttgccgcctcgattgcgcagcagatcaccgatggcgcattcagaagcggggataagttgccttcgctgcgcgagtacatgcgcttgcatcaatactcgaagaacaccgttatcaccgcctatgagcacctcgcgtctcaagggctggtcgaagctcgccacggacgtggctttttcgtttgcgacgtgtcggcagcctctctggaagatgacgagtccgaaccctacacccgcgcgctggacaccatttggatgatgcgtcagcaattcgtccgcgaacccggccactcccacctgggtgaaggttttccgccggtggagtggctgatggacatgcgcctggacaagtttcaccgtcaggtcgtgcgaggcggggttacaacgctgtttcgctatggcacgcggcttggcaacccaggtttgcgccagcggctgatccagaagcttgccgattacgccattaccgtctcgcccagacaggtcgtcaccacacttggtgccaaccatggcatggacctgatcatccgccgctacgtcaagccgcgggacatcgtgctggtagaggatccgggttactaccccctgttcggcaagttgcagcttcaaggcgcacgcatgctgggcgtgcctcgccaggcggacggccccgatctggacgcactggagcgtatcctcaagcggcacaaacccaaggtgttctttctgcaatcggttggccataacccaaccggctccgatctgtcgtcagccaaggctcttcggttactacagatcgcagagcggcacgatctgctcattgtcgagaacgacgccatggctgacttcaaaccaagctcgtcggtcaaactatcggcgctggatcaactgaaccgcacgctgtatctgggcagcttttccaagtcgatctcggcggctctacgggtcggctttattgccggcagcaaacagcgcatcgaggagctggccgacctgaagatgctcctgcataacagcggcgccgaatacagcgagcgcaccatcgatgtgattctgggcgaaggccacttcctcaggcatttggcgcgcctgcaagatcgcctccgagacgccaccagacgtgggctcgagatcctcgacgaactcggcgccgaagttttttgccgcccggagcaaagcctctacctctgggcgcgctttccaggtatcgacgatgccaacagcctcacccgacactgcttgagtaaaggtgtgatgctcgcaccgggttccatctttgccgtcaaccgcaatgttctcgtctcgtggacccgactgaacgtcgcctatctggacgaccctgctttccggaagagcctggaaaaatagaagagccgctatgagccgtcagttgaacagcgggttttcccgcagtcgtgcaacggccaggtcgacgaaagaccgtacctttgccggcgcctgccggccttccgggtacagcacgtggatgggcagcgggggttcttcgaagtcgctgagtacgatgtgcagctcgccgtcgcgcaacgcggggccgatctggtagagaagtactctcgtcaggccccagccggctttggccgtcgcgatcgccgcttcgttggtattgcactgcaggacagggtcgatgacgacgcgctggccgtgcgcaaaacgccattccggggaggcccaggcgctgctggacgcgacgatgcggtgatgcttgagatcggccggttctgcgggtacgccgtgggtttgcagatactgcggcgacccgcagacgacgcgacgcacggtgccgacctggatcgcggtgaaacccgagtcgggtagatggccgatccgcacggcgacatccatgccctcatccacaatgttcaccgggcgatcgatgaagaatgtcctggcgtgcatgttcggatgtgcatcgagatattccgtcacgatgggcaacacatggatttgcccgaacatggcggacgccgtgaccgccagcgtgccggacggcgccttgtaatggccggccgcggcggattctgcttcggcgatgtcgctcagtatgcggcgacaatcatcgaggtagcggcgtcccgcttcggtggtcttgaccgaccgggtggtgcggacgaacaggcgcgcgccgatcagctcctccaaggccgccacggttcgggtaactgccggcgcactcaggtgcatctggcgcgctgtttttgcaaagctttccgtttccgcgaccttgacgaacacgcgcatcgccaaccaacgatccattccttgccctcttttccgtcaggcagccttcaggcagcgctcgggtcgttcttcggatgctgtcggagcagcgcgccataataggctggacgcggcgacgcagcgacttgggcgcagggcaggtgccggagccgagcggccgggcttgctgccatatgaacaatcttggcgataccgacccggaccgcagggttccggaaggtctgacgactaccttaccggaagttggcggatcgctatcgagccccaagatcgcgcctcaaaaaccgaagtcgctgagaccgggatggtcgtctgggcggcgccccagtggccagcggaatttgcgatccgcttcggtgatcgggagctcgttgatgctggcgtggcgcacgcgcatcaggccgtcctcggcgaactcccagttctcgttgccataggcgcgaaaccagtggccgctatcgtcgtgatattcgtaggcatagcggactgcgatgcgattgcccgtgaacgcccagagctccttgatcaggcggtagtcgagctcgcggttccatttgcgcaccaggaaggcctcggcctcggcacggttcgtcacgaactccacgcggtttcgccagcgggtatcgggcgtataggccagcgccaccttggcggggtcgcgactgttccagccgtcttcggcaaggcgcaccttttcgatggcggtctgttcggtgaacggcggtagcggcgggcgggacatagcaaaactcctcaagtgaacggaaggatgaccacgaacggcagccggtcctttcctgcatcggaacaagcaggcggttggctgggtgctgccgatagttctattcaagcggatccggatcctgtttgccgagtaccatgcagcgcggggcgcttcggggcacgtggcaatcaggcggacagcagtgcgtcagagtgcaagctggattcggttttcctcctcggtttcctgctcggcaggtactgcgcaacagatgagcacctcgtcgtcgtcaaccttggcggtgggatgcttcacgtaggtcaccgtgcccttgagcagcttcgttcgacaggttccgcagctgccagcgcgacagccgaattcaggcgcgaggccacgcgcttcggccagctccagcagcgtgccggtctccggtgtccagcgcgcctccttcagcgaatctacgaagaccaccggcaccgcctgggtcgccggtggcaattgagcaggagtggctgcggccgcatcgctcgtgcggattaacgacgccggcccaaacgcctcggcgtgaatgcgctcatcgacaatgcgatagccgcgcaggccgtcgtatagcgcctgcgtgaacggcggtgggccgcacaggtagaactcgtagtcgccgaaggcgagaaaacggctgagcagcggcatgtcgatgcgacccgaggcgtcatagtcgatgcccgcccgagcgtcacgggtgtcgctcaacacgcggacgagccttacagcgccctgtgcggcggcgatcagctctgccagttcctggtcgaaggcgcggtcctgcttggaacgtgcggcatagaacagcgtggcggggcggatccgttgcctgcgcagcccctcgtagaccaggtggcggagcatggcgagcatcggcgtgatccccacacccccggccaacaggaccgctggccgagtcccatgcgcatctagcgtgaagtcgcccgtcggcgcgcgtgcctccagcgtgcttcccacatgcaggcgttcatgcagataccgggacaccgccccatcgcgtttgacgctgatacggtaagccccatcggaaggggcgaccgacagcgtgtaggtacggataagcgccttgtcctggcctggaagccgcacgcgaatgggcaggtgctgaccggccaggtgtggcaaccctgcgccgtccgccgggaccagatgaaacgaccggatcgttgcgctttcctgaaccacctgcgtcactttcagggttcgccagtcgtccaggaatcgagctgcgcgcagccgctcgtgcgcatgctgccagtcgccggtcatcaacgagctgtcggaccaaccaccgtcctggaaggcccaccgcagcgcaaggccggcgggcctgcgcacgattttccgtgcgcggaacgtccaaagccgctcggcgccttgaaatgccgctatttccggtgactcgaagatcacttcggcctcgccggtcatctggagcatgtcccccgtctcgaagtcgacgaacagcagcccagccttgccgttgagcacgatgttgccaagcgtggcgaagaacagattgccgttgaagtccggaatcgtcagcgcgccgtcctcggacacccgaacgaaaccggccttgccgccccgatgggaaacatcgacctgacggcgttcgcctcgatcagcgtaggaggtcacgaaaaacgcatccgcctgctcgatcagcgcacgggccgccgggtcaagcgtcgcgagttgttcgatctgcccggtgaagggctcgtcgggatccctggcaacggtgaagtcgcgcagttggatataacgggggcaattgccaaagctctggtcgacctcgaccctgaagccaggatcggtgatcgagagaatgccgttcatacggttgcggcgccgcgtatgcatctcaatgcccaacaggccgaccgcggcgccttcgaccaaaccacggcccgctggatctccaggagccgggcgggctgcgatgtcgagcgtcgttcgcgtcggcgaggccatgaagccctgcctgccttccagaaaggtcgcccaggcatctccctggtcgtccacgctgcccatcacgatgaacggaagctgggcgtaaaactcgcgatgctggtcgggcatgaagtcccgcacgacacgcggaccaaccgcttccattcgttccgccacgccgagtttttcctggatgagtttctcgcccgcgtgccagacggctgattgatgcgatggctcggccatttctgtctctccggtagctggaagcgggtggggcgccctgggtccgcttatgccttggcggtcagcccggcaggggtttgggcgaagggaacgaagcctggcagcgcttcgatgcgacggagcaagcgattgacggcggggtaggcggacaggtcgacgttgccctccggtgcgcgggcgatgtagctgtagatcgcgacgtcggcgatggtcgggtgatcggcagccagccaatcgcggtcggccaggtgctgttccagcttgccgagcagggcatgcgcgcggccgatgacttcgtcggcgttgaacccggcgccaaacaccgtgatcaaccgggccgctgccggtccataggcgagctcgccggcggctaccgacaaccagcgctgaacacgtgccgcacccagggcatcttccggtaaccaatcgctccggccggctttcttggcgaggtagacgaggatggcgttcgaatcggcgatgtcgacgccgtcatcttccagtgccggcacctggccgaatgggctgatggcaagaaactcgggctttttgtgagcaccggcttgaaggtcgacttcgaccagctcgtgttcgaggccaagcagcgatgcgaaaagcaccactcggtgagcatgaccggacaagggatggtgatggattttcatggttcggctcctgggcttatcgggccgggtgtatcccgatccgtgccgagagtgtgtgaccgaactgttttttgaggaatatcgcttctaggtacttctttgtttcacctgctggaacaatcctgttattccagctcgagccactggcggattgggcgctggcgcgacgcaccttcgtaggctcaagcgcacatttcgtccggtggcagggcacatgattgacgggcgattttcccgcggcccggatatgatgcgcgcccctcaacgctcccgctcgatcagcaggccaccatgcccggcaatgcgctctataccgacctgtcgggttactacgatctgatgtgcgccgatatcgattaccgcgcacaaagccactgcatccagcgcttgcaacagctgttcggcaacggtggccggcgccacctggacctcgcctgcgggaccgggccgcacgtgcgccacttcatcgatgccggatttgccagcggtgggctcgacatcaaccagccgatgctcgaccgggccgcgatacgttgcccggaagcgcgcttcgttgcgcaggatatgtgcggtttcagcctggatcggccggtcgatctgatcacctgtttcctgtattccatccactacagcggtggcgtcgaacgtttgcaggcctgtatcgccagcgtgcatggcgctctggccgctggcgggctgttctgcttcaacgccgtcgacaagcacagcatcgacaaccgctcgttcgtctcgcatagcgccgggcacgccgacggcctgttcaccttcagctccgcttggtactacgcgggcgctggcgagcgacagtcgctcaggctgcgcatcgagagaaccgtcgccgagcaaagccaggtctggcacgacgagcacgccatggtggcggtgagttttgtcgaattggaagagttgctggcgccgtacttcgacgtccatgtgctcgagcatgattacgaaaggatcgttccgcgcgaaagcgcgtccggcaacgcgcttttcgtctgcgtaaagcgctgatagccaaacgcggtcccgccattgcggcgtggtcgtttcaggaggtccagcgccgctccgagactggcgacacggcacgcgactctggccacgtgctgggtcaggccatgccgagcggggtcagtcgccaggactgacgccgcgctcgggcaacgaccgcttcgagccttactgcgtacggaaccgcccgaccagctgccggagtgcgctgctgagctgacgctgctcctgggagtagctttcgacttccgaggcttggctggacacctgggcaaccgcatcgctgatggcgaccacgttccggttgatgtcttcggtcaccaggtgctgttcctcggtggcggtggcgacctgcgtggtcatgtcgcggatcgtctgcacggcattctcgatgtcttcgaacgcccccatgacgtcgccggccagctcgatcgccttgctcgactccgtcaggctgtgatccatgctcgctgtcacctcactgatgcggctgaccagcaggttgaggatcttgttgatctcgccggtggaatcctgggtccgcttggccaggttgcgcacctcttcggccaccacggcgaagccgcgtccctgttcgccagcgcgtgccgcttcgatggcggcgttgagcgccagcaggttggtctgttcggcgatctgctggatggtcgacaggatggtgttgatgctcaccgtctcgcgttcgagctcgcgaatcaccttgctcgaaccctggatgctggcgccaagatcgttcacccccgcggtactgcgggcgatgacctccttgccattgcgcgtcgcatccaggccctgcgcggagacttccgccgtcctcacgcagttgtgtgctacctcgttggcggccgaggccatctcggtcacggcggtgacaatctgctccaccgcgctggactgacgctgcaagctgtccgacatggcggtggtgcggtcgttggtctggcttgaaacaccatcgatgctgacggcgttttccttgatgacggtgatcatcgattgcgtcgactcgatgaactggttgaaccacttcgccaactcgccggtttcgtcccgggccagcacggggagccgatgagtcaggtcaccttcgccctgggcgatggtgcgcagcccgtccttgaccaggttgatcggcgtgacgatacggttggcgaacacgaccccggcgataccgaacagcaccaccagcacggcgcaggcgaccagtgtcatccaggctagtttatgtgcgccggccaggatctcgtcgacctgcatgaaaccgatgaatttccagcccagggtgggcgaggtgaagacgttggcgaggtagtcgacgccatcgatattcacctcgatcacaccgttttcggtttgcttgatggtcgagaagtagtcacccgagagctcgccgagcttcttgaagttgttcttgggctggtggccgtcgaccagcagggtgccgctgctctccaccagcatgaagaaaccggtctcgccaaagcggattttttggaccatgtcggtcagcgactttagcgacacgtccgtcgccacgaccccggcaaactggcccgccttgtccttgaaggctttgatcaccgagacgtagaccgcgtcgtccggttcccagtaatagccgtcgaggcgcgtcagttggaaattggcgtccttgcccaggccgaaccaggggcgcccccgcggatcccagctgccgtagtcgccggtgcccggccattccacgtagccgcccttggtgtcgcccatgtagacatagccgaaggacgggttgttgttaccgatgccggagaagtaatcgaagatctgtttctcgcggcccccgttggccgtggcggttgcgccgggcttgcggggcggcccgaagtaggtggtcagctcgccactctcggtatcgcggacggcggcgtagtcggccatcgccgacacggtgtgattaaccgaatcgaacagggtcacgaaggtattgtcgaccagcttgacgtccaggctgctggtctcctcgaactggagcttggcttcctcggtgacgttgcggatggtgaacagggccacgacaaggactggaacaagcgtcgcgaccaaaagacttgctagcaacttgtgtttgattttcatcgttcagtggcctctggccagttcgtcgagacgtccgcgccgacctgcgcttcgttcttcagggagcccttcacgcaatccaatgcgctttgccgccgtggtaggcgagcggtgccaagaggttatcggcaacctgtgatagcggcttgagggcaggcctctgcgatttttaagtccggcgagctgcgcaaatgcggggtgttttttcatcgcgcgacacgctcgtcagcgcaacatgatcggcgcaccggttcgctccatcgaccgcgcgattagccttgcgagaagccttgggttgaccgaaatcgctagccgggctgccgctagtctttcgcgacgtctggcttcttcttgcgcggccggggtggtttgggagcgggcaacaccctggcggtttcgatcaccagtcggcgaagggcatcggcgtcatccagcagctcgtcggctaccggatagttcttggcgccggggtagggcgggccttggggcagctccggcgcgagggcgagcgccgcttcggagggtttgatgaacaggctgttgtcgcagacgaaggcgaccacctttgcgtccagatagagcgcgtactcgccgaacattttccgatagctcagccggctcccgaggccgatctgctccgccacgtagtccacgaagtctttatcggtggccatctgtattccgccgtctgatgggttggacagttcctggtgcgtcacgggcgagcctgttcggtggtgcgcgttagcctgccgccgagtgccaatcctgcaacgtctgcacggcgtcgatgagctaaacccgaaccaggtgaagcctagcacccagcggcaaggaaacagacggtcggaaacggcgagtttaccggtcggcagggctcggctgctcctatgcccgacacgccgtacgcgggccgccgttttgctccgtcaatgcaggcgcgtcgccgaggcgcaggtctgaatcaggtactcagcctgctgcgccagctcatcgagcagggcatcgcgctgcttctcggcatcgctcatggcgtcggcgccgtgctgcttcaccaggtaggtgtgaatctgccggacctcctcggactggaaaatcggctgcagatcctgcaccgccaccacaccgctggacgcctggttacggttgttcatcaccacttgcgggcctcgagccgtcaacggcatgaagcccagcgcttcgaagtacggcaccttgccggccacgcatgccacctccgcgtggggatagcgcgtcatcatcgcctcgatcatcgcccggccgatgccctggcggcgatggctcgtctgcacggcgaggtagagcagcacacaggccttggggtcgtccacataaggcaaatacagcgcaaagcccagcaggcgggccgggtcttcggcatccagcgccatgatcagttcaggcttgcccggttgcgcgccgtccatgctgtccagatagcggtgcacctctaaacccaccacgtactgatacagctggtacagcggattgctcggcgtgagcgaaaccgggctgatgtcgctgaggtagtccaccaccatctgcatcacctggctcttcatcgattccggcggcggggtgcacaggtgggagagggtgaacatgggcgggctccgacgggcttgggaaaggccgccattgtagcgggcagggatggggcgctgagacttcaacagttgcctatcgtgtctcggaagatccgattcaaagccggcaacagcgccaaacggcgctgaaggctaccgggttgctgaaattttcggagcaagcaggggctgtttcgcagaaccgctgcgctccccggaccaggtcctagacgggctcggcctgtcgtgggtgagccaagctcggtgtggggtcgtcaagctccgtctgaagctcccgcaccaacgcatcgacttcacgtagcgcctgttccaccgaagcagccagcacctcaccgccggtttcctggccttcgatcgcaatctgatggaagcgagtgaaaccgataaagccgagcgccgtcaccaggttcggctccagatgattcatatgcgccatttccccgccgggcccgaagccgatgccgcctcgtgccgtgaggatgaccacatgccgtggtcggtcagccaacagggggacgtagggatccggcagcttgctttcgtcgacctcgattgtccggccgggacgcacgatctggtcgatccatgccttgagtgccgcgggcatgccgaagttgtagagcggcgtgccgatgaccagcacatcggcggcaatcaactcgtcgaccagctggtcgctctcgatcagcgtctccttcatccagggctcacggcgttcttccggggtgaaggatgacgcgatccagtcatggctggtgaaagaaggcgggttctggccgatgtcccggtaggtcacgctgtcctgggcgcggcgggccagccactggctgacgaagcggtggccgaggtggcggctgtgggaaccgtgctcgtccctgccggcgaggccggggcgggcgctggcatcgaggtgcagaagctgtgtcatggtgagtctcctttgtgactgaattcatctgtcattcgcggtagacccagactaggtttaggctctgtgggcgacaaacgaccatttctttcggttacagatgaggaaaactcagccatggcgcatcgctggttaccttcgctttccgccctgcgagccttcgaagcggccgcccgccatgagagcgccaagcaggctgccgaggagttgaacgtcaccgccacggccatcagccaccagattcgttcgctggaagagtccctcggtgttgcgctgttcctgcgcaaacccaggcagttggcactcaccgtccaaggccgtgagctgcaacagaccctggagacggcattcgacagcatcagcgcaacggtcgagcgcctcagcgcggggccctgccgccaggcgatcacgcttaccaccacgccggccattgccgtgcgctggctggtgccctgggtctgcatgctgcgtcaatcccatcccgatatcgatctgcgcttccatacctcgcacgaaccggtcgcgctggatggcgttacggcggatatcgccatccgctacggcgatggccgttggccggggctggtggccgaaaagctgatcgacaataccttcgtcccgatctgcagcccgcttttgggccttcgtgacgtagccgacctgcccaaccacccgctgatccacttccgcgcccggggcgccacttccgccccgattcactggtcgtcgtggcagaagctggccaacgtgccggggctggacgtcagcgccgggttggccttttccgacgagacccacgccatttcagctgccatcggcgcgcagggcgtggccttgatgagccgtcagttgatcgaggacgaggtgagggcagggcggctgatgcagccgttcgggccggagatggaaggcaagccgtttcacctcgtatacccggaaagccgtcgggatgatccgacggttctggccgtgcgggactgggtcatggcggtgccgggtgggttgtgtgagctgtagcggcgtgggcggatgaggcgttcatccccgttcaacagttttccggttctacgcggctcgctcaggccggcagcgcggcgcgtgggcgcaaggtcaggctggcatgtaccaccagcgttgcgatgaccagcgcgccgccgtaaagcgtcgcgctagcgggcgtctcctgcaggaaataccagacccacagcgtgcccagcacgctttccagcagatagaacagcgccacctcggcagatggcagatagcgggtcgcgttattgatcagcagcgtggccagcggcatctggaccaaacccatgaccgccaatgcccagtagctcgtggcgtccaggccgaacggctcggccttgggccaggcgatcagcgcggccgccaatccgccgagggcaatgagcggcatccgctcgatggcagggtggcggcgtagcaacgtgaggttggcgcccacggctgccgaggacaacagtgcatagccgttgccggcgaaatccgacggcgtgaaagtaccggcgaataccaccatgatccccagcgccgccacaccgatcgccagccaggtatgcaacgccaccggctcacgcaggaagaaacgcgtaaacagggcggcgaacaagggcgccgtgctgaggaccaccaccacattggcgaccgtggtatggatgaccgccagcacgaagaagatcgaaatcaaagccagtaacaaggccgagccggcgctgatcagcggttgcgccttgaggctggcccggcttctggcggtcagcgaaaacacgcccaaggccagaaacatcaacagaccgcgccagaacacgatgctccagccatccgcctgcgccagacgcaccaacagaccatcgaagctgagtacgacgatgccgctcgtgacgagcaacaaaccgcgcgcttgatcgttcatctgtggtcctcggcgtgtcgttgatatgggtgggttcgtcctgggcgcgtcactaaaaggcccgcgccagatgctctctgatgatggcccccgggcgcacttataacctgcccagaagcggcctgggggctgcggttcgcgacccatggattcgtcgtgcgctcggttgcgctataggttgagcgggcctgcatggtatgcgacgaattaattgcgatcgcaataatcgaaaggccccagccatgccctatggttctggcgggccaaacacaaagcgacatggatgacatggcgatgtcgcagcctgacggctgatcacaggcggtgcagtaacgccgtagggtggaacagagtctctcccgcgcgtttctaccaagctacctcgctgcggatcacgccccgtccgcggattggctcatcaagctgcgatcagtcaggcggatgctgttccgcccgccgcgcttggattcgtacaacgccacgtcgccctgctcgataagcgccgcaaggctggcagggggctggtcgaacacactgacgccgatgctcagggtgacaggctccggcgtggcgaaatgctgattggcattgtcatggaaacgctttcgcagcccgtcgcccagcgccacgattcgttcacgggaagcgtcgcctagcagaatcacgaactcatcaccacccagtcgcgccgccaacgcgcctccaggcaggactgcacgaatcatctcgcccagggcaatcagcagccggtcgcccgccgcatggccgtgcagatcgttgaccagtttgaagttgtcgatatcgatcagcagcagcgcgcccggacgagcaggcgaggcctcgcttagcaaacgtggcgcccttgcctccagggcgcggcggttatacatggcggtcagggggtcccgcgcggccagccgctcgatctgcctttccctgcggtagcgcacagtgccggtcatcgacagtgcgatcagcataatcgccatcaccccttcgaccagcgagatctggatgatcgtgccgccgaataccgagagatcaatcagcgtgcccggcaccaccggcggaatcatcttggcgaagtagaacaggctgtgccccagcagcacataccgcagctgcgccgcaccggcgcccagcgacttgtcgcgcgaacgcagcagcagacttgctttgagcgtcggcagcgcgaccaggaaagaattaagcagcaggatgaccttcgaccagatctgctcgcccggcagtagcagcagtgcggcccaggcgacgaatatcagataccagccgcgagacaggcgcacgcccctgaaccgcgcgacacccagcagaaacagccagtgcgcggtcaccagcagaccattggcgaaccagatcccgatcagtagcaacccgctgacacgcagcagggcgagcgtcgagccgatactgatcaaggcgaagcccgcactccagaacaacagcgacggctcacggacggtccgccactcgacggcctgatacaacgcagccgccaacgcgagcgcgacggagagcgtcaacatggtgagcgggtcgagtgccatgggtgaagcctgttgattgcggtggaaatgacagtgctagcggagccacggcttgtcgaagcgtggggcaacgagaggtaatcggccacgaggcctggcgcttgaatcgaatacgacgaccggcagacgcgccgctctagggcctgttgcaggtttcgtttcgcccgcttgatgggacgcgcgactagcggctaggtaatgtcatgccttggaacgatgggttattggcgcgcgcccccgacggagccggggaaaccgtgatctgggtgtggtgctaagaaaaaccgctaggcaactcgaagcggcaccgtcgcgatggaagtctggccgcaggccagacgcggatgttgggggtggcctgcctgctctttggttactttctcttgaccagacagaagaaagtgacgcgccgtgcaaggcgaaacctgccggtggggccgaggaaaacgtggtgggggacgccgagcggcgagccggcagccgaaaataaatctgccccttttttcgcgaatgctgaaggaagctaactcttagatccaacttttacattgtttagatatcatcagagagcttatcgcctgcattagcagtcggcaaatgtttatacaatcgaaagggtgtcgatgaagattcagcgatggaccgagagtgaactgaagctgacgttccatctgtactgtcagctgccatttggccggcttgaccaccgtaatccagaggtaattgaacttgctacgctgctcagtcgtaccccatctgcagttgctatgaagctggcaaatttcgcaagcctcgatccggcgattacttcgagcgggcgtaaggggctcaacggtgcgtccaggttggatcgtgaggtttggaaaaactcccatgcagactgggaaggccttgcagttgaatgcatggcgcttcgggctagccttgttgacctagtccaacctaaggctggcatagcggaagcggagtctggatattttgtaggagaaacccgcattgctacggttgagcaacgaatcaagcaaaatttctttcgccgcgctgtgctgagcagctatggaggacgttgctgtatgtcaggtattaacgaacagcgtctcctaatcgcaagtcacatcgtaccgtggagccaagacaaggcaaatcgcctcaatccggcaaatggcctgtgtctgtctgcgctacatgatagggcgtttgaccaaggcctgatttctatatcgcctgaatacactattctggtctcgccattgctagccaagacgaacgagcccttcacaaaacaaatcttcggcgcgttgcacgccaaaccgattgagttgcctgagaggtttatgccggacggagcgtttcttgcctggcaccgtgagaatattttttttggaccagcatagggtacgtttgggtatctattggcgatagcttcaaaaccggaacggttcaaactcatcaaatcctattctagatagctcatcacctagcttttgagatattcgaaaagctcttctttgtttcaaatcagcaatccactgatagtttatttttttatcatcaataaagatgaagttaccatactgatccttttcagctgtaatttttgactctgcttcggttatgtttggtgaaaatataattgacattgcttttgtataagccttagctgctaagtccaagcctaggtaagctaattctccactgccattcaaaacaggaacgacctgctgcggtttgccggttgaactgactaatggaacgaaaaagaatgcgtgttgggcttcaagtcgcacggtatcgcacgcggcttgcaagcagatccaaaagtttgactgcggatctctaatgattgtacctaaccgcattgttggtttcgctgtgcttgaactagaaaaaatacggcttttaggatgcgacctcactccagtgaggcacgcaaactcgtacatactccgttcagaagcagcgaggctaaccgaaaataccgaagaccagcttccttcataatctgatttttttggaattggctgtcctatgaaatctatggcccgcttctgcctaccgctaataataaaatccttgatttgctctattggagcttgagcttccaaaacctcatctccttttttgtaatgcaacctaaaagattggtttccggctgctagatggtctatacggttctcaatggcattctttccagcccacttacgagaaacaccatctctatcgacagcgctttttagctcgctcagtacgacatctaatgcatattgttctgcttcgtcagcatttactatagatgctctatgaaggaagtaaggggcgtccataccgccatgaaattgagagattagatgatgtgctacgtttctaatcgaggcaatagtagctaacgctacgttagatagaagcccttcggatatcgctgcgaactcgctgagaagccgggtgggaagctgttgttcatctacttggtaatgtgacaattcatggctgacctttgtgccatgagctttgaatagacaaattattctgagcccattttttcctgttatggaagaatcacttaaagtcaaattcagaatacttttggttttctcattgaacgattcgtatatgctttgcaatattatgtcgagtcttttgtcgccggtatatatagagatcaaacgtaagcggccttgcctctcaaggtctgattttactatcgaatggatcaagccacgtgcggtctcgccttcatcatggaacatttcccaatcaaggctaactatgtcgacacgttccgctgccttgactactttctgcgtcatgtcttcgtttttgtcagccggccgaagtacagagcagatgagccctaacgccattgcgctatcgattagttttttcgcatctaggtagtgaaggatttctgactttgctttaataaggtcgttagtttgagcgatagttcgggaagttcgcctacttggcgtttgtatagactgcaccgcctcggctttgggttcggagcttgcttgatcgtcaacgacaatcatggtttgagcgaactcactcgcagccgcaagcctatcggtgatgaagctacaagtctccatttagttcttatcctccattgctggcacggctgcaactcgaaaggaagcgccttgcatggtttctaccaagcttaattcgtagccgactttctctaacgatttttgcgagatatatagacccatgcctcggccgccgggacggcgcgaaaagtttagtgaaaagatgttgcgggcatcgccagatgctatcccagggccgttgtcgcttataacccagccattatcctttttgtcgagcaatattttttttggcctatcgtgtactcgttccagccagaatatcgagttatcaacgaggtttacaaatacaggataaaaagaagaagtgtaaccaataatgaaactatctaagaagtcaggcgaagccgtgaggctgatattgctttttgctagtcgttctccaaaaagattctttaggaaatcgaatatgtccttccctgtaatttcactttccttccgatataagcgcctgtctaacggcgtgaataatgtaaggtaaccatctagatggtcaaagctgctgcgcatatcaatataaagagagtgtaacgaagggttttcggccgcccaagctctcaagcgccggaatccgtcccgtaatgctccgacggttttttcaaattcgtgtgtgaccgtgctaagtgccataccaagttgagctagttctagattggagtcccttttttctcgcaatgcttccaattcttcctctagcgcctcctcaacctcggcgctgtcatattcttgatcattttctaaattgcgaactgtttgaagttgatcgcgaagccgaattagcttactgaactctttttcataagctatcgtgattttttgttctagcgtttgccttgcatctgatatgtctgggagaatggtggatgacctttgataggtttccaactcagctaatgcatcatctacagcgtgatttactgctttaaagctttctttggctgtggttcgtgcctgctcaaacacagaagacgctaaagcgtcagtgtcagattttagctttcgtgtagactttattacctcgtcagccttactgcttatcgcagtattcaatctcagcatgtgatcgactggaatagcctttgcattagacgcttcataaaccatgctttcgatttggttagtggcagcatgaaatacatcttttgctaatcgctcatattcagttaggtacacgtcccattgattgtttagttctcgcgacaggcccacaccccgtggtttcgatattgctagagaattttgctctaagcgtatcgcagctatagcgttctcttcaatttttaatatagagcttgctttgtagctgtcaggttgttggccgttaatgattgcgtcaatggttagcttagcttcccttaatatattttgcgttttatgctctgggtgacgctcgctagtcgtctgaaaaaaatagtctagctcttttttaagggatttctttttgggatttacctgtgccgctttctctctccgtatacgctcgtttttatttagctcttcgcgatgttcactccattgatcagcgtatcgaccttcatcacggaaaaaatctgcagccgattggatgaagaaattcattagaatagatcggaaatcgcgatatgctttgttttccctaaatccttctcggccggctttctcagtgaggcggctattgatttccccgttaagctctattactccgaaaagcctgcgataagaatagaaataataccccgcacctaagtttctcctgcgctctatgtctaggaagtcgtaatcagagtctccgtaaggctgtactcttacgccatctctataaatatagatgcctccatgcctatcaagttttctctttagtcgggaatattcttcgcctgccaccagcgagtctttttcagcaccttgtaaataagcgaaagacaacgagaaaggtccgcatgcggttggggtgccatcagctttatcccagtttaatacgtaaggttcaggttgcttatgatagattccgatcttcccttggaactgaccatattcatcaaagcggcctatcacatggtgatcaacctcttcaaactcctcgggctggaaaaatgttttctcgccaattcgttctatgggagagccttcgtccacatagtctctaaattttgttagtatgggtgcaggtctggaccccggtgtcatcgtgttcgtaaagccgataagatttttctcgaacctggtagcttttccctcatcagcccggttatcgatatcgtcttttattaagtcgtcggccggcgttatatagaagtgtgtgccgtaaccgttttcggttaaagtgggtgctccgagttcttctgctagtgcggctggatcgatactgaattgggatacttcgttaagaatgttctgtaaggatgcaggttcaatccgatttttcagtgatatgagggattgtgttaattcctcgagcatcgatgttatcgtatcgatatttggcattgttcctggctctaactcacgaaccgggattactacgtcttgtagatccaagcctggtagttcgaatattgcccagtttaagtatgcaactacagtgttttcttggaaaatgccacgtttcgcgcgtgttactactaatacttgcgggccaagtacggctattgcgagacgacctattcctttttcaccaagtatcggtcgggtttcttgatctgggtctttaggggggcgggataatgctttgctaccgactttgctgtctgtgcctaacgttagccatctattctcaaagtcttcacgagtcattcccagcccatcatccctaaggacgagaaggcgatccgatcggaaaaaatcaatttctacattgcgcgcatatgcatcatgtgcatttttaaatagctcgcttattgctgtagggattcccgcaatctgttgccgtcccaacatgtcaacggtgcgagctctaaccctaaatctcgccattacgctactagtcctagctgatgcatcctataatgtttttggaattcaagcccaaaaacctctgccattttaactggaacggcattgcctacttgcctagccatggaatttaagttccctctaaatatgaaatctcttgggaacgtctgtaagcaggcggcttcgcgcacgcttatggctcggttctgttctggatgaccaaatctaccattagagaggcttatacatctggtggtcagcgcagatgctggtttgtcccagatcattcttccgtaaacgtcagaatggccaccgtgggctttgtggcaatcaagccagaggtctcggggccagtcttctcggctgccgccgattggagtattagttatacgacgtaaatttaaaggagataaggaggctgcgcgatgtgtcggatcagttaggcacgtagtaccagcctctaacggtggtaacccatcgatccattcgcgcactgtgggaagctgttctcgatggccgctaggtccatgcgtggcatttggtagttttatagggcctaacagacttgccacaagaactaatcgcctgcgtctttgagggacgccgtagtgataagccatgacgactttatagtcgtagctataattcaacctatcaagcagtttgataaattctgagaatgggccatccgaaccatttattgattgcatgccagggacgttttcaatgaagatgtattcaggcttaaaatctataacgaagcgatggaattctggtagcagcgctcgcctgccatcattccctcgtttttgtctgttttgtttagagaaaggctgacacggcgcgcaagcgccaaaaacaattggcccgttattatttcgggtgatatggggtgcgaggtcaccaacacctaagtcccttatatcgcgacacaaaaattccgattcggggaagttgactataaaggtttctgcggcgtcagggtcaatatcaacccctaatcggatgtttaagcctgcgagcctcataccacaactcgtgccgccgcaaccgctgaagaaatcgtaaaagtccaggttacttctcctgccacagttttccgtcccgcgtacataatgcccgtatccatggcaggcaatgtagcttgtcgtgtttatgatgcctcagccgagccaaaatacgaaagcgctgcagcatgcggaagctgcagctcggtggcgactggtttggctcagaaagccttggacgaaaggctcctgcgtggaagcttaaaggttgtcttcaatcccaactcaaagccccacccgtctgatactcaataaccctcgtctcaaagaagttcttctccttcttcaagtccatgatctcgctcatccacgggaacgggttggtggtgcctgggtactcttccttcaacccaatctgcgtcaggcggcggttggcgatgaatttgaggtagtcctccatcatcgaggcgttcatgccgaggacgccacggggcatggtgtcgcgggcgtattcgatttccagctgcgtaccctgaaggatcatctgggtcgcttcgtccttcatggcggcgtcccacaggtgtgggttttcgatcttgatctggttgatcacgtcgatgccgaagttcaggtgcatggactcgtcgcgcaggatgtactggaactgctcggcggtgccggtcatcttgttgcggcggcccatggagaggatctgggtgaagccgcagtagaaaaagatgccttccagtacgcagtagtaggcgatgaggttgcgcaggaattctttgtccgtttcgacggtgccggtctggaacgtcgggtcggagatggagcgggtgtacttgaggccccaggaggctttcttcgcgacgctcgggatctcgtggtacatgttgaagatctcgccttcatccatgcccagcgactcgatgcagtactggtaggcgtgggtgtggatcgcctcttcgaaggcctggcgcaggatgtactggcggcactcggggttggtgatcaggcggtacacggccagcacgaggttgttggcgaccaggctgtcggcggtggagaagaagccgaggttgcgcttgacgatgcggcgctcgtcctcggagaggccatccgggctcttccacagggcgatgtcggcgttcatgttcacttcctgcggcatccagtggttggcgcaaccatccagatacttctgccaggcccagtcgtacttgaagggtacgagctggttgaggtcggcgcgggcgttgatcatttgcttgtcgccgacgtgaacgcgggcggattcgccttcgagttcgtccaggccttcctgaatgtcgaggtcgtccagggctttcttggcgcgggcgacggcagcggagtcgtcagaggcaacggcgcgggcttcttcgacggagcctgcggcgtcctggtcgagtttggcaggggcttcggtgctggcggcggctggttgaggtgcggccggcgcggcggtggtggtttcttcttcgtcgaattcgtcccagctcagcatggcggtttctcctgattggggaccggggtggccggtcgggaatgtttttgggcttttgtgtgtgcacgcaaaagcgggtgttttgttgggggagggtggttgtgccctgtcccggtgttctgtatcaggtcggggtttaggtccggcctttgtgttgtctggtagagcgacccctcaccctagccctctccccaaaggggcgaggggatggtcggggttgggccgaccatttgtgttgttttggaggggctggccctcactctggccctctccctgttggggtagggatggtcggggttggcccggccatttgtattgttttggagggttgcccctcactctggccctctccctgttgggatggggatggtcggggtgtggtcccggccatttgtgttgtcttggagggttgcccctcgctctggccttctccctgttgggatagggatggtcggggtttggtcccggccatttgtgttgtctggtgggcctgcccctcgctctggccttctccctgttgggatagggatggtcggggtttggtcccggccatttgtgttgtctggtgggcctgcccctcaccctagccctctccccggaggggcgaggggactggatcggtgttggcctccggtccgttgctcaagcggtctgatgcgttggccaggtccgcttataagcaacggcttagcgttcctacaggtaacccatcattgagtgagtcaaacgcttgtcgtggctttgctttgtcagtagctactcggtgcaagcggtttccagagcgaggcagcgctaggcgcctggcgggtcggagcccctgagcgtacgcacgtacgtgatgggggccgacctgccaggcaacaacgcgcggtccgctctgggagccgcgactttcaactacttattggcaggcttcgcagtctggttcatcaatcgcacaggccttcggcaccggtgccgggccggctgccatttctggagcgggcgcggccttggccggggcagcgctggcgccgctgttgccaccgctggacacggcgttgagtttgccggtgttgacggtggacttctcggtgctggtcgcggccagggcgcggaggtagtaggtggttttcaggccacggtaccaggccatgcggtaggtcacgtccagcttcttgccgctggcaccggcgatgtagaggttcagcgactgggcctggtcgatccacttctggcggcggctggcggcgtcgacgatccacttggtttcgacttcgaaggcggtcgcgtagaggtctttcaattcctgcgggatgcgctcgatctgctgtaccgaaccgtcgtagtacttgaggtcgttgatcatgaccgcgtcccacaggccgcgcgccttgaggtcgcgaaccaggtaggggttgatcacggtgaattcgcccgagaggttcgatttcacgtacaggttctggtaggtcggctcgatggactgcgacacgccggtgatgttggcgatggtcgcggtcggcgcgatggccatgatgttcgagttacggatgccgttcttgacgcgggcacgcaccggcgcccagtccagggactcggtcaggtcgacgtcgatgtacttctggccacgcgcttcgatgaggatctgctgcgagtccagcggcaggatgccctggctccacagcgaaccctggaagctctcgtaggcgccacgctcgtcggccaggtcacaggaggcctggatggcgtagtagctgaccgcttccatggacttgtcggcgaagtcgatggcggcatcggaaccgtaggggatgtgctgcaggtacagcgcgtcctggaagcccatgatgcccaggcccaccgggcggtgcttgaagttggagttcttcgcctgcggcacggagtagtagttgatgtcgatgacgttatcgagcatccgcacggcggtgcgcacggtgcgctccagcttggcggtgtcgagcttgccgtcgacgatgtggcgcggcaggttgatcgagcccaggttgcagacggcgatctcgtccttgttggtgtttagcgtgatctcggtgcagaggttggagctgtgcaccacgccgacgtgctgctgcgggctgcgcaggttgcacgggtccttgaaggtcagccatgggtggccggtttcgaacagcatggacagcatcttgcgccacaggtctttggcctgcagcgtcttgtagttcttgatcttgccgtattcgatcagggcttcgtagtactcgtagcgctcctcgaaggccttgccggtgaggtcgtgcaggtcgggtacttcgctgggcgagaacagggtccacttgccgtcgtcgaagacgcgcttcatgaacaggtccggaatccagttggcggtgttcatgtcgtgggtgcggcgacggtcatcaccggtgttcttgcgcagctcgaggaattcctcgatgtccaggtgccaggtttccaggtaggcgcagaccgcgcccttgcgcttgccgccctggttgaccgcgacggcggtgtcgttgaccactttcaggaagggcacgacgccctgggatttgccattggtgcccttgatgtaggcgcccagcgcgcgcaccggggtccagtcgttgcccaggccgccggcgaacttggagagcagggcgttatcgcggatggcgtcgtagatgccgcccaggtcgtccggcacggtggtcaggtagcaggaggacagctgcggacgcagggtgccggcgttgaacagggtcggcgtcgaggccatgtagtcgaaggacgacagcaggttgtagaactcgatggcgcgtgcttcgcgctgttcttcctcgatggccaggcccatggcgacgcgcatgaagaagatctgcggcagctcgaaacgcacgccgtccttgtgcaggaagtagcggtcgtaaagggtctgcaggccgaggtaggtgaactgctggtcctgctcgtggttgatcgcggcgcccagcttggccaggtcgtattccttcaggcgcgggtcgagcagctcgaactgcacgcccttttcgacgtaggcgggcagggccttggcgtagaggtcggccatctcgtgatgggtggcggactcggcgacttccaggaagctcagggcttcggcgcgcagggtgtccatcagcaggcgagcggtgacgtaggagtagttcggctcacgctcgaccagggtacgcgcggtcatcaccagggcggtgttgacgtcggtctgctcgacgccgtcgtagaggttcttcagggtttctttctggatcagcgcgccatcgacttcttcgaggccttcgcaggcttcggtgatgatggtgttcaggcggcccagatccagcggcgacaggctgccgtcggcgcgcttgatgcggatgctcgggtgggcatcgaccggtacgtcgaccgcgccgcgcttgcgctcttggctgcgcgattcacggtagatcacgtagtcgcgggcgactttctgctcgccggaacgcatcagggccagttcgacctggtcctggatttcttcgatgtggatggtgccgccggagggcatgcggcgcttgaaggtggcggtgacctgctcggtcaggcgcgccacggtgtcatggatgcgcgacgaggcggaggcattgttgccttccactgcgagaaacgccttggtgatggcgacggtgatcttgtcatcggtgtaggggacgactgtaccgttgcgcttgatcacgcgcagctggcccggcgcagtggcggccaggtccagcgtgctgtcggcggcgtgcgggttctcgcgaatggactcgttctgcatggggtctccggattctctctgtctcggtagcacgttaggtgtcaggcctgctttgtgggcggccttgatcgggtcttgcgtgtctcgtattgcatgaaccatgccccggcgaaccggaccatgggtaactcaaactggaaacgatccggcacccggggaggtggcgaatcgaatgtgccgaagcatagtcaggcgttgtgaagttcacaacctcaaaacacaacatgtagtgtgatgcacttggcgcgtgcgctactgctgggcttgagcaaaatcaacgttgggctgcgcagggtcgcggtctgcggcggcgatccatcgcgccaggtgcgggcgcgagccgggtaaaaaccagagcgaattattttgcttgcttttttcggcgtttgtgtctgtttggcttttgacacccaacatatggggtaaaaggccgctggagcgacacgatagtgtcggttcaggcacagtgcaaggcgctgaaaatgaacaacctgtggataagatgtgggcgagctgtgcgcgatagaggcgcagcccgcgccgtttcggggctgcacggggttcggatgaaatgcgcgtccactgacgcattcgggcgcctggcgatgctccaggcaaaacactatatgtggtgttttgtcaaagacggatttattgcgttttgcagcctttcggggcgccgtctcgacggaacggacctgaatgctggccttttgcctggagagccattgacggtggagattcggctcgccgctgcgacggcggccgagaggggcgtcgcgtctacctgtgtcctgccgatcggtgatggtcgaggcgtttcccatggcggcgccgcactgaacgcggcggctgttggcagcatgtctacggctgccatctggccgcgccctgacgctacaatgccggccggtgtatcgggagggcgcgtggtggatcaagagtcttggaacatcctgattgtcgaagatgaccagcggttggccgagctgacccgtgaatatctggaaagtaacggcatgcaggtctcgatcgaggcgaacggtgccttggcggccgagcgcatcatcgccgagcggccggatctggtcgtgctcgatctgatgctgccgggtgaggatggcctgtccatctgccgcaaggtgcgcgatcgctacgacggcccgatcctgatgctcaccgcccgcgccgacgacctcgatcaggtgctcgggctggaaatcggtgccgacgactatgtctgcaagccggtccgcccgcggttgctgttggcgcgtatccgcgcgctgctacgtcgtcgcgaaggtgcagaagccgcgtcgcccagcacgaccaagcgcatccagtatggcccgctggtggtcgataacgcgctgcgtgaggcctggttgcgcggcgacggcatcgagctgaccggtgccgagttcgacctgctctggctgctggcgtccaacccggggcgtaccctgtcccgcgaacagatcttcgccgaactgcgcggcatcgaatacgacggccaggaccgttccatcgatgtgcgcatttcgcgcatccggccgaagatcggcgacgacccggaccatccccgactgatcaagacggtacgcggcaagggctacctgttcgtttccgaagcggccgaagcgctgcagtgaattcaatcttcctgcgcatctacggcggggtgctcgccgtgttggtgctggtcgggctgctcggggccggaggcctgcacctgctcaacgaggtgcgcgctgatcatcaccgcgaggcgctcgccgccggcacctttcgcctgatggcgcacaacatgagcagcatgacgcccatcgagcggcggcaggcggcgaacctctggggacgcctgctgggcatcccgctgcgggtgcgcacgctggaagacgtcagcctggagagccgcctggaaacccgactgctgcgtgggcaggtgctggtcgaaccgctgcggccgggcagtgtgacgatttattccctggtcagcgccgagaaccatctggtgctgaccggcgaggtggagcagctcagcgaacagctggcgcgggccaccatctacctgttgatcgacgaactgatccgctatcccgaggccgaacagccccagcgcctagccgagctcaaggccgcccgcggctttggttacaagctggagttgctgacccgcgacagcgccagcctcgatgacgaccagcgccgccgactggacgagggcgacacggtgatggcgctggtgggcggtggcgaagccgttcaggtttatgcggcggtgtccggcacccgctggatcatgtcgctggggccgctgtatcagctcaacccctatccgcctcaattgctggtggtgatcggcgtgctcggcctgtccctgatcgggctgaccgtctacctgctggtacggcaactggaacagcgcgtacgcggcgtcgaacgtgcggccacgcggattgccggcgggcatctcgaagcgcgggtaccggatgccggaacggattcggtcgggcgcctggccaaggccttcaacgggatggccgctcatctgcagcgtctgctggcggtgcagcgggagatggtcagcgcggtcgcgcacgagctgcgcacaccggtggcgcgtctgcgcttcggcctggaaatggccgccgaggcgcagacgcccgaagcccgcagtcgatacctggagggaatggatagcgatatcgacgacctcgatcggctggtcgacgagatgctggtctatacgcgactggaacgcggctcgccggagctgaccttccaggcggtggacctcggtgcgttggtggatcaggtgatcggtgagctggcgccgttgcgcgccgatgttcacgtcgagcggggtccctgtacggttgcggccgatggcgatagctcggtcgaggccgagccgcactacctgcgtcgggcattgagcaatctgatcaccaatgccatgcgtcacgccgatagccgcgtgcaggtgagttttgccgtcgatgccgaacgcgccagcctgagcgtcgacgacgacgggcccggcgtgccggaggaagcctgggaaaaggtcttcacgccctttctgcgcctggacgacagccgtacgcgcgcctcgggtggccatgggctggggctgtccatcgtgcggcggatttcctactggcacggcggccgctcgcagattggccacagcgaactgggcggcgcccgcttcagcctggtgtggccgcgtaaacagacagggtcgcgactccctgcgcaatgatcggccggggcgcgaccctggcgtttgcaggcgatgggttgcacccatcctacggacggaactcatagaccgcgccctgcacgtaggatgggtgaaacccatcaagccactgttgcggccgcgtagacagacggggtcgcggcttcctgcgcagtgactggcctatgcgcggccctggcgtttgcaggcgatgggttgcacccatcctacgggggacttcatcgacggcgccccgtatgtaggatgggtgaaacccatcaagccacgactcaagggtccgtcgggctcaaaggcagtcagaccggaacgccgacaaggctcagcacgtagtcctcgaactgggcgaactggccgtccagctcggtgccggttttccattcgtcagagaggtcgttgagcaggcgcaggcgcgcgcggccgtcggcgccctgatgaatcagctccgcttcctggaaatagaagcgcgtcttgaccagcggatagagggccttgaacaggctttccttgatcgagaacgtcagcgtcacgcgcaatgcccgctgcgtttcgtcgagctcggcccagcgttgcagttcccagggggtgagaatttcttctgccagccgctcggcccgtgtggcgggtagcagccgctccacatcgagcccgagcccgcgccattgctcggtgcgcgccgccaccaccgcggcccagccagcgccgtgggtgatggagccgaccacaccgctgggccagcagggtgcgcggtcttcaccgacggcaacaatggacggcacgccggtgattctgtgcaaggcttcgtaggcgcaaatgcgcccggccagaaactccgtctggcgtttgctgaccgccttcatcggcgggatgccccagcggacgaagtcttcgggatcgagccggtcaggatcgaaacgggtgcttagcagccgtacgccggaaagggcgaacggcagcggccagtgatcctgtagcggcgtgcaacaggcgggatgtcggggagggcggttcatgccggtcagtgtgcctcagcgaggtggcaacgtgcaggggggtgaatctttgcttcgacctgttcgcgagccagctcgcctgtacggctatggcttctataggagcgggctctgcccgcgagcggtggtccggtgtgtgccgaggctacgggtcgcaggcagagcctgctcctacagtaaacgtcggaataaccgaaccacgatagttcggccgatgatcggccatgcctcaatagccatgttttgcgagccagctcgcctgtacggctacggcttctgtaggagccgggctctgcccgcgatcggcggtccggtgtgtgcagaggctacgggtcgcagacagagcctgctcctacagtaaacgtccgaataaccgaaccacgatagttcggccgacgatcggccctgcctcaatagtcatgttttgcgagccagctcgcctgtacggctatggcttctgtaggagcgggctctgcccgcgatcggcggtccggtgtgtgccgaggctacgggtcgcaggcagagcctgctcctacaataaacgtcggaataaccgaaccacgatagttcggccgacgatcgatcatgcctcaatagccatgttttgcgagccagctcgcctgtacggctatggcttctgtaggagcgggctctgcccgcgatcggcggtccggtgtgtgccgaggctacgggtcgcaggcagagcctgctcctacaataaacgtcggaataaccgaaccacgatagttcggccgacgatcggccctgcctcaatagccatgttttgcgagccagctcgcctggctatggcttctgtaggagcgggctctgcccgcgatcggcggtccggtgtgtgccgaggccacggggcgcaggcagagcctgctcctacagcaaacgtcggaataaccgaaccacgatagttcggccggcgatcggccgtggctcaatagccatgttttgcgagccagctcgcctgtacggctacggcttctgtaggagcgggctctgcccgcgatcggcggtccggtgtgtgcagaggctacgggtcgcaggcagagcctgctcctacgataaagcgtggcgacgggcgtatcagttgccttccggccgggcaaggattctgggagcggcttcgatgatctgccgcgacaggttctccatgcgcggcgactggactttccaggtgtgccagtaaagcgagatgtccagcggtgcatcggcagccaggtcgaccaccgcaccctgggccagcgcgtcgtgcagcagcggttccggcaccatgccatagcccagcccgtagcggatcgcattgaagcgcggctcggcgccgggcacatagtggcaagggtaggcgccctcgggcaggcccagctcgcgcagcaggaaagacgaggtcaggcgatctttgcgggtgtaggcgaccaccggcgccttgcgcgcggcattgcggttcatcccgtaggggaagtattgctggcgaaacgcggcggacgcgaccagacgatagcgcatgctgcccagcgggctcgccgtacagccacgcattggcttgggttcggtgctgatgcagccgatcgccaggcccgtctcgagcaggctgtaggtgtggtcctggtcctcgaccgtcaggtccagcagcacccgttcacgaatcagtacgtcggccagggccgggaaaaaccaggtaccgaggctgtcgacgttaagggcggccaccaccaccagagccgcatcgctgcgttcggccagatcggccatcaggtcggcttcgagcaaggcggcccgcttgaggtactgcagcagccgctgaccggtttcggtcgggcgacagggccggctacgcactaccaatgcattgcccagggcgctttccagggcccgcacccgctgtgaaatcgcgggcggcgtcaggtgcaggcgcagcgccgcttgctcgaagctgccggttttgatgaccgcgcgaaaggcttcggtctgtttggggtcgagattcaagccctcggtcctcaggttaagtaaatatttgcatagcctaattttgctaaatcacgccgattaaacccgagtgtgccccataattgcgcgctttcctctcgcctgccccttttggagttccgctgtgacgctgctgcacatcatctacctgatcgccattacggccgaagccatgtccggcgccatcatgggcatgcgccggggcatggacctgttcggcatctgcatgctgggcacggtcactgcgctgggcggcggcacggcgcgtgatgtgctgctggggcattatccgatcggctggatcgcccatcccgagtatctgggtttcacggtcggcgcggccattgtcaccgccatgatcgctcggcacatgcatcatctgcggcaggtgtttctgctggtcgacggcctgggcctggtggccttcacggttatcggttgcggcgtggcgatggacatgggtgcgcatctgtcgatcgtcgtactggccggcgtgattaccggcgtgttcggcgggctgctgcgcgacattctctgcaaccgggtaccgatggtgctgcggcgtgaactgtatgccacggtggcgctgttcaccggcgtgctctacgtcagcttgctgtggctgggcgtcggtaactccatcgcttcgctcgccacgctctgtgccggtttcctgttccgggtgctggcgatgaccttccagtggaaacttccccatttccaggtgcgcgacattcgcgggctggactgaccgccacgtttcgcccggcccggcatcggccagtttccttccgacggtcgccggctctggtatgcagattccaggctggcgagccgctacactagcggcctggcaaccaggggaatggatccgtgctgaaagacctaggaatcaagagtcgcgtgctggtgctgatactgctgcccagcacggtgctggccgtggcgctgggcgtctacttcacgtggatgcagttgtcggaaatgcgtcaccagctcgacgagcgcggcaagctcatcgccgaacagctggctcccctggcggcgccggcgatggcacagggctatggcaagcgcctgcagcgaatcctcaaccaggtgctcgaccagccggacgtacgtgcggtaacggtgctcgacgccgagcgcaatcagcaggcccacgccgggccgaacatgatcaccccctcgccgccgacggaccctgaggcgctgacccaggtcagcagcgtcgacaccacgcgcatcctcctgccggtactcggcaagcatctgaacctcgccacggacaacccgaacgacgatcttcgtccgatcggttggctggagctggagctgtcgcaccagggcaccttgctgcgcggttatcgcagcctgttcaccagcctgctgctgatcggggcggggttgatcatcaccgcactgctggcgctgcgcatgagtaccgcgatcagcaaacccctgcacaaggtcaaggtggcggtggcgcagctcaaggatggttatctggaaacccggctgccgccgctcggcagccatgaaatggatgaggtcgcggcgggcatcaaccgcatggccgaggcgttgctcagtgcgcgcgaggagttgcagcagagcatcgaccaggccaccgaggacgtgcagcagaacctcgaaaccatcgagatccagaacatcgaactggacctggcgcgcaaggaggccctggaggccagccgcatcaagtccgagttcctggccaacatgagccatgagatccgcaccccgctcaacggcatcctcggctttacccacctgctgcagaaaagcgacctgacgccgcgtcagcaggattacctgtcgaccatcgaaaagtccgccgacagcctgctcgggatcatcaacgagatcctcgacttctcgaagatcgaggccggcaagctggtgctcgacagcattccgttcaacctgcgcgacctgatcgaggacaccctgaccatcctcggcccggcggcgcacgccaagcatctggagctggtcagcctgatctatcgcgatacgccgctgtcactgatcggtgatccgctgcgcatcaagcaggtgctgaccaacctggtcagcaatgccatcaagttcaccaacgaaggcacggttgtcgtccgggccatggtcgaggacgagcgtgccgatcgtgcgcagctgcgcatcagcgtgcaggacaccggcatcggcctcacggatcaggacctgcgcgcgctgttccaggcattcagccaggcggataactcgctgtcgcgccagccgggcgggaccggactcgggctggtaatttccaagcgcctgatcgagcagatgggcggcgaaatcggggtcgacagcattccggaggagggctccgagttctggatcagcctgagcctgcccaaggcccgtgacgatatcgaggatctgccgcgtgcggcgctgctggggcggcgggtcggcctgctcgagcagcatccactggcccgccaggcgttgcagcatcagctggaaagctgcgggctggaggtcttgccgttcgattccctggatttgttgcagggtgcggtggccggagcgcaaacgagcgaacaacccatcgagatcgctgtgctcggcgtgagccaccgtgaaatcccgccgcagcagttatgccagcggctatgggatttcgaggtgttgggctgcaagtgcgtggtgctcagcccgaccagcgaacaggcgcagtaccacgaagcgctgcccgagtcccatacccatgctcagctgcaaagcaaaccggcgtgcacccgcaagttgcaacgggtgctgctggatttgctgcgcccgccacaagcgctgggcgagagccttgcgctgcccgaaacccgcccgccgcgcgtcctttgcgtcgatgacaacccggctaacctgttgctgctcgaaaccctgctcaccgacatgggcggggacgtcgatgcggtgagcagcggcgccgacgcgctggaggcggtcaaacgcaagtccttcgacctggtattcatggacgtgcagatgccggggatggacgggcgccaggccaccgaggcgatccgccagtgggaagtcgagaacggccagccaccgttgccggtgatcgcgctcaccgcgcatgcgctatccaacgaaaagcgttcgctgttgcagagcgggctggacgactacctcaccaagcctatcagcgagcggcaactggcccaggtcatcttgaaatggacggggctgccgcttgcgcgaagctttctcgccgcgccggccgaagtgctgctgccggaaaatgatctcaaggtgctggacgccgaggaggggctgcgcctggccgccggcaaggccgatctggcggcggatatgctgagcatgctgctggcgtcgctggaggatgaccggcagatcattcgccaggcgcgccaggccaatgaccggcaagcgatgatcgatcgcgtgcaccgcttgcatggcgccacgcgctactgcggcgttcctcagcttcgagccgcctgcgagcgcagcgagacactgctcaagcagaaccacccgagcgcggcccaagcgatggacgaactcgacagcgctatcgagcgcctggaagtcgaagcccgcgtcgtctagcgcggcatcgtccgcagccccgttcgccccgaggtcgggcctcccacaaaaagcgggcctgagcacggcttaatgttgggggccgcgccccgcggcgaatgggctcgacgcaagcacgaggcccggcgtgatccggtcagcggtgcccaaccccattcggcccgaggtcgagcctcctacaggagacgaggcctgaacgccgcccttgtgtgggagccgcgctccgcggctaatggctcggcgcgtacgcgcggcgcggttgatctgatcaggtgcgtccaatatcgtccgccccgaggtcaggcctcccataaaggtgagctgagcaccgcttttgtgggaggcgcgccctcgcggcgaatggactcggcgcgcacaagaggctcgggtgaccaataaggtgggcccaatcttgtccgccccaagatcggcgccccacaaaagaagcagggcctaagcacggcttcatgtgggagccgcgcccccgcggcgaatgggctcggcgcgcacgtgcggcgcggttgatctgatcagatgctcctaatatcgtccgccccgcggtcaggccccccataaaaaggtgagctgagcaccgcttttgtgggagccgcgcccccgcggcgaatgggctcgatgcaagcacgaggcgcggcgtgatccactcaggcgtgcctaatcccattcggcctcgagatcgggcccccacaaaaaagatggccctgagcgccgcttttgtgggagccgcgcccccgcggcgaacgggctcacgccacccgcgggttattcgcccatcaccacgccttcgcgccgcggatcggcgccgccgaaccaaccgctgctggtgcgttgtatagcctgcaatccgctggtcatctcggtttcgttgacctggtgcccacgggcttcgagcgccttcaccgtggcctcggggaagcggccggcttcgaggacggtcgggccgttgaagctgccgaagttcggcaggtctattgcccgctgtgcatccaggccccagccatacatgcccagcagggtcttggcggtgaagtgaatgatcgccgcgccgccgggcgaaccgacgctggccagcaactggtcgcccgcggcgttgaataccagggtcgggctcatgctggagcggggacgcttgttcggctcgacccggttggccaccggtgtgccttgcgcgtcacgcggctcgaaggcgaagtcggtcagttcgttgttcagcaggtagccgccgggcaggccggtaccgccgtcgttgagcaggcgcgagccgaaggcctgttcgatggtggtggtcatcgccagggcattgccttgctcgtcgacgatgctgatatggctggtgccatattccggctgctcgcgctgcggggcgaaggcgagcggcatatcgcccgggtcgccggcttcggcggtgcccatgctgcgcgggccgatcagctcggcgcgctgcttgaggtacttgggcgccagcatgctgttccaggtgcgccccggcaccgggacgaaatcagggtcggcgatgtacttggcccggtccgcgtaggccaggcgcgaggcctcggtgtagcggtgcagaaactctgccgatggcacgccctgatccagcgccggcagcggcgacaactgctcgagtatccccaggatctgcatctgtgtgaggtgcccggaggatggcggtgggaatccgcagacctgataacgctgctgccaaaggttgcacagcgcatcgcgttggcgcggttgatagacctccagatcgctcagggtcatggcaccggcgttgtcctgttcattgacctgctggaccagcgcctgggcgttggctccgcggtagaaagcgtcgctgccgttgtcggcgatgttgcgcagcaactgggccaacgctgggttgcgcaggcgatggcccgctggccacggcgtcccgtcgggctggtagtaaaaggccgccgagggtgggttgttgcgaagcgccggatcgctggcgagcaggccatgcagccgtggactgatttcgaagccgtcttcggccaggcgaatggccggctgcagcaggtcccgccagggcagtttgccgaactgccggtgcgcctgctcgagcatcttgacggtgcccgggactcccaccgagcgaccgcctacaacggcctgctgaaagtccatcggggtgccgtcggccttcatgaacaggttttcgtccaccgcggcaggggcggtttcacgcccatccagcgccgttacctgcgcgccatcccaatacagcagaaaggcgccgccgccgagcccgctggactgcggttcgaccaggctcaagaccatctgcacggcgactgcggcatccagcgcgctgccgccggccttgagaatctggtagcccgcctcggtggccaggggattggccgcagccacggcgaagcgctccgttgcccagccgggttttgcgttgtagccactggaggcttcaggggcgggcgggatacggttggcggagtcgggggcggaacagccggccaagccggtgagcagaaaggtgaagaccagtgcgagcgggccgagcggcatgggcgggttccttgtggacgcgagatagacgtgttgcttatagacctagactactgaccactatctgccaagctcgatcgctacgtttgttccttgccgcgttctttcgcttgggcttcgacgcaggccgagtggtctgcccgtgcccggtcgttgccggtatcatgtgcgccttccaaatgccgctcggttcatcgacgccatgacaattcagtacccgaccattgccgattgcgtcggcaacacgcccctggttcgcttgcagcgactgcccggcgaaaccagcaacaccatcctggtcaaactcgagggcaataatcccgccggctcggtcaaggatcgcccggcgctgtcgatgatcgcccgggccgaagcgcgtggcgacatcaagcccggcgataccctgatcgaagccacctccggcaataccggcatcgcgttggccatggccgcggccatcaaaggctacaagttcgtgctgatcatgccggacaactccagcgccgagcgcaaggcggcgatgaccgcctacggcgccgagctgattctggtgagcaaggaagagggcatggagggcgctcgcgacctggcggtcaagatggcggccgaagggcgcggcaaggtgctcgatcagttcgccaatggcgataaccccgaggcgcattacagcagtaccggccccgagctctggcagcagaccggcggtggcatcacccatttcgtcagctccatgggcaccaccggcaccatcatgggcgtgtcgcgctacctcaaggagcagaatccggcggtccagatcatcggcctgcagccgatggaaggcgcatcgattcccggcatccgccgctggccgcaggaatacctgccgaaaatctaccagtccgagcgtgtcgaccgcatcgtcgacatgtcgcaggacgaggccgagcgcgtcatgcgccgcctggcccgcgaagagggcatcttctgtggtgtgtcgtccggcggtgcggtggcggctgcgctgcgcctgtccgaggaagtcgagaacgcagtgattgtcgcgatcatctgcgaccgtggcgaccgctacctgtcgacgggcgtgtatgacgaacccaattgacccgtccatgcccagtcaaggcggtattcgctaatggccaaacgtagcggcggtttgcgcttccagcccagtggtggcgagaagaagccgcagatcccgaccggcaagaaacagcggctgggtatcgagcggctggccaatgatggtcgtggcatcggctttctcgaaggacgtacctggttcgtcgagggtgccttgcctggcgaaacggtcgaggcgcgggtgctgggcgcgcgcagccaggtcgtcgaggcgcgtagcgagcgggtgctgaccgccagcgagcagcgccgccttgaaccctgtcctcacgcgcgcgtctgcggaggctgcaacctgcagcatctgcccgcaggcgaccagctcgccctgaaacagcgcagtctcgccgaacagctgtcacgcctggcgaacatcgagccgacaacctgggcggcgccgctcagtggcccggagttcggctatcgccggcgcgccaggctggcggtgcgctgggacaacaaggaccgccgccttgacgtcggtttccgggccagtgccagccaggacatcgtcgctatccgcgaatgccatgtgctggtacagcccttgcaggcgctgctgccggcattgctgaccacgctgcacgcgatggacaagcctcaggtgatcggtcacctggaattgttcagcggcaccgccgaggccatgctggtgcgccacacggctgcgctggcagcgacggatctgcagcgtctggagaccttcgcccgggaacagggcgtgcagctgtggctgcagggcgaaggagggcctcagccgttggagcccgcctatacgctgggctaccggttgccggcctgggatctggagctggcctggcggccgggcgacttcgtccaggtcaacgctccggtgaacgaggcgatggtggcccaggcactggaatggctggcaccgcaagcgggtgaacgggtgctggacctattcagtgggttggggaatttcaccttgccactggcgcgtatcggtgcacaggtggtggcggtggaaggcagcgagcagatggtcgagcgcgcccgcaccaatgcggagcataacggtctggatggggcgcacttttatcaggcggacctgtcgaagccgcttgtcgaggcgcagtgggccgagggtggcttcgcggcggtcctgctcgacccgccacgtgacggggcgctggaaatagtccggcagatgacgactttaggcgcaaggcgcgtggtctatgtttcatgcaaccctgcgacactggcgcgtgatgcggccgagctcgttcgtcaggggtatcgactcgcgcgggccggcgtgctggacatgtttccacaaaccgcccacgtcgaagcgatggcgctgttcgagcggtcggcgtagcgcggaattttcggcaggcgataggcctgcggttcaaccgaccggctccgagaaagccggcgtatgacgcatacgatgcgtagaagggaaggtagatagatggtccaggtcagagcgcttcagccgatcaacaccgacggcagtatcaatctcgaaggctggctcgatcatgtgctggggatggacccggcactcgaccgcgacgcactcaagcaggcctgcgagttcgcccgagcggccgaacagcaggccaacgcggcgcagaatctgtggagcgaaggcacctccagttaccagacggggctggagatcgccgagattctggccgatctcaagctcgaccaggacagcctggtggccgcggtgatctatcgtggcgtacgcgaaggcaagatccagctggccgaggtccatcagctgttcggcccggtggtcgccaagctgatcgaaggggtgctgcgcatggccgccatcagtgccagcctcaacccgcgcgagtcgctggtgctgggcacccagacccaggtggaaaacctgcgcaagatgctggtggcgatggtcgacgacgtgcgcgtcgcgctgatcaagctggccgagcgcacctgcgccatccgcgcggtgaagaacgccgatgacgacaaacgccatcgcgttgcccgcgaggtcttcgacatctacgcaccgctggctcatcgcctgggcatcgggcacatcaagtgggagctggaggatttgtccttccgctacctcgagcccgagcaatacaagcagatcgcccagctgctgcacgagcgacgcctcgatcgcgagcagtacatccagaacgtggtgcagcagctcaaggacgaattgaccgccaccggcatccatccggagatcgacgggcgtgccaagcacatctattcgatctggcggaagatgcagaagaaaggtctgcagttcagccagatctacgacgttcgcgccgtgcgagtactggtgcccgaagttcgcgactgctacaccgcgttgggcatcgtgcacaccctgtggcggcacattcccaaggagttcgacgactacatcgccaaccccaaggaaaacggctatcgctcgctgcacaccgccgtgctcggaccggaaggcaaggtattggaagtgcagatccgcacccaggccatgcacgaggaagccgaactgggcgtctgcgcgcactggcgctacaagggcacggacgtcaattccagttccaaccactatgaagagaagatcgcctggctgcgtcaggtgctcgaatggcacgaagagctgggcgatatcggcgggctggccgatcagctgcgtgtggatatcgagcccgaccgcgtctacgtcttcaccccggacggccatgccatcgacctgcccaagggtgccacgccgctggacttcgcctaccgcgtgcacaccgagatcggccacaactgccgcggcgccaagatcaatgggcgcatcgtgccgctcaactacagcctgcagaccggcgagcaggtcgagatcatcaccagcaagcacggctcgccaagccgggactggctgaacccgaacctgggctacatcaccacctcgcgctcgcgggcgaagatcgtccactggttcaagctccaggcccgcgatcagaacgtcgcggccggcaaggcgctgctcgagcgcgaactggggcgtctcgacctgccgccggtggacttcgacaagctggcggaaaaggccaacctgaagaccgccgaggatatgttcgccgcgctcggtgccggtgacctgcgtctggcgcagctggtcaaccaagcacagcagctggtggagccggatagtcatgcggccgatcagctcgaactgattcctcgccgccccaccagcaccaagccgggcaagcgtggcgatgtgcagatccagggcgtcggcaacctgctgacgcagatggccggctgctgccagccactgccgggcgaccccatcgtcggctacatcaccctgggtcgtggagtcagtatccatcgccaggattgcgcctcggtgctgcaactggccgggcgcgaaccggagcggatcatccaggtcagctggggtccgattccggagaagacctacccggtcgacatcaccatccgcgcctacgatcgttctggcctgctgcgtgacgtttcgcagatcctgctcaacgagcggatcaacgtgctggccgtcaacacccgttcgaacaaggaagacagtacggcgcagatgaccctgaccatcgagatccccgggctggatgcgttgggacggttgctgagccggatctctcagttgcccaatattatcgaggcgaagcgccaacgcaccgcctgacctgctgcgctcggccatacggcgttgcaagcctgctgaaaaatgctcattggcaacagccaactccgctttttcagcaggcttgcgccttgtctgaccttcgctcgcgacggtcagacccgcgacctgctccgagctgctgcgctcgatctggcgttgttgaagcctagccagctcttcgctcgcgacgctcgttatgggccgcacgtcctccgatgagccgagcgtagggtggatgtcgttttttacatccaccatgaccatgtcgacgctggactgaggtcgttgtgggctgctcgcggtggatgggtgaagcgtcatccaccctacaatgggctcagcttcaatctcaggctttcaccgaggaatccatgtaccaactcaacgacctgctgcacctgatggcccggctacgtgatccgcagcatggctgcccgtgggatttgcagcaggattacgccagcatcgtgccgcatacccttgaagaagcctacgaagtggccgatgccatcgaaagcggcgacttcgatcacctgccaggcgagctgggcgatctgctgtttcaggtcgtctattacagccagttggcaaaggaagaagggcgcttcgagttcgacgcggtggtcgacggaatcacccgcaagctgctgcgtcggcacccgcatgtctttcctgatggcgatctctacggctcgcccgagctgccccgcctcgacgaggcgcagatcaagcagcgttgggaggaaatcaaggccgaggaacgcgcggagaaatccgccgcgccggagcagttgtcgttgctcgacgatgtgcccagcgcgctgcccgccctgagccgtgccgccaagttgcagaagcgcaccgcccaggtcggcttcgactggccggatgctttgccggtggtggacaaggtgcgcgaggaactggacgaagtgctcgaagccatgagcgagaacgatcccgaggcgatcgccgaggaaatcggtgatttgctcttcgtcgtggtgaatctggcgcggcaccttaaagtcgatccggaaaacgccttgcgcgcggccaatcgcaaattcgagcgccgcttccgtttcatcgagcaagccttgcgagacagcggacgggccatcgagaattgcgacctggagacactcgacgcgctgtggggcgaggccaagaaaggcgaacgttcaccttcctgcggctagccgcgagggtggatgtcgcttttcacatccaccacaatgcgcttcaacgccgttacgcatgtctaccctgcgccattttgaattcaccacgagacgagccgaacatgagtctttcccttcgcgatcagctgctcaaagccgggctggtcaatgagaagcaggccaagcaggccggcaagcagcagcagaaacaacagcgtctggtaaagaaaggccagatcgaaaaggacgactcccagcgtgaagcggcgctcaaggcacaggccgagaagctcgcccgtgatcaggagctgaaccgtcagcagcaggaaaaggccgcgcagaaggcgcgtaccgcgcagatcaagcagctgatcgagaccagccgcctgcccaagctgaccaccgaggattactacaacttcgtcgacgacaagaaggtcaagcgcctgtctgtcaacaagctgatgcgcgacaagctgtctagcggctcgctggccatcgtccggcacggtggcggttacgaggtgattccgcgcgaggcggcgctgaaaattcaggaacgcgatccgcgccgcatcgttcagctcaacacccagacagaagctcctgacgcggacgatccctacgccgcctaccagatccccgacgatctgatgtggtaaggctcgccgtcagcttgctggcagctgcgcgctaccggtcatgaggtcgctcgcgcaccggtagcgccgcgtaaccctcaggtgcgcgcgttccatgcccgacggaaggatggatttatgccgtctgaccgcgctctactgctatagcccatccgggcttgtggaccagcaggaggacagcgacatggaaacccatccttacgcggacgaactcgacaccttcagcttgcaggccaacggcgtaccgggcgacccggaagagcccggcgtgccggacctgcccagcgaacccggcgagccgaccattccggatcagccaccacccgcgccggtcgcctgatctgacggcgatacccgagacgcccgagcgagcaggtcgaccacctgctcatccggtgtctgttcgaaattaccgtaatggcgacccacgccgatgaacggctccggcatcgccaggcacagcagctcgtccacttccgtcttcagcatctcgatcacgtcccgcggccccaccggcacagccagcaccacgtggctcggtttggactgcttgagccctttgagtgccgcccgaaccgtggcgccggtggcgatgccatcatcgatcacgatgacgcagcgaccggtgatcaccggcgccggccgatcgccacagtagcgacgccggcggcgctccagctcggtcagttggcgctgcatttcctcctcgaaccagtttggcggcggagcgacctggttgagcagttcctggttgatgacccatttgggctcggcgccatcgatcaccgcgcccagcgccaactcctcgtttcccggcgcgccgattttgcgtaccagcaccaggtcaagtggcgcaccgagacgctgagccacttcgaaggcaaccggcacgccgccgcgcggcaacgcgagcaccaagggattctgctcagacaggtgatgcagcgcctcggccagctcctggccggcatggctgcggtcgcgaaacagataggactcagacgtgaacgcgcgcatggctcactctccgaacgggtaggtatccggaacgatttcgtcgtcgatctgctgagggccgataggcgtcaccgcggtggtctgctccagccagatcaaggcgtcgaactgttcggacagtatggcctggaaataatggctctggcgttcagtggccggccggtagatgacgccgatcgcgcgttccaggcgcggtctggccaatgcctggcgcaacgacgtctcgttgcgccagctggtcagtgaagcggcgatgccggtccgcaggaacaggttttcccagctgtccggacgggaggggcggacctgcttgatctgcatgggctcatcccagttgtccgccgctgccacctcgccgcggtcggtggccatgccgatgagcacggcgtcgctgccgaaggcggtccggcacagctcgccgatgttgaattcgccgccccagcccatggacgtcgatgccgcgttgccgatgtgcgagttgtgcgcccatacgatggccttggcatcgtcgccgcgatgctccagcagcgcgcgcagggtatcgaacatgtgtcggtcgcgaagattccacgactcggcggatccctggtacatggcgcggtaatactgctcggcggccatcacgacgcgggcgttgcgctcggcgttgaagaagctgccaccgtctcgctccagatagcgcagccgctggtcgagcagcgcgcgcaactgctcgactacctggtcttcacaggagggctcgccgagcatcaccttgtggccataaaccgccggctcttcatgccaagggctcaggcagccgtagcggcggcgcgcggcgctggcagcctgcggatcgacgcggtccaggtaatccagcacttcacggatcgaagagccgaggctgtagacgtccaggccgcgaaactctgcgcgccgctcgggcgccagcccctcgttgtgactgcgcagccaaccggcgaagtcagcgacttcccggttgcgccacatccaggtcgggaaacgcttgaagccttcttcgacccaggtcggcggttgctggtgacgcacgtaccggtcgatcttcgccgcatccggccaatccgcctcggcggcgatgatgttgaatccgtggcgctcgaccagtcgtcgggtaatttgcgcgcgagcgcgatagaactcggaagtgccgtggctggcctcgccgatcagcaccacccgtgcgtcggcgaactggtcgaagtgctcggcgaacagcgggtcgtccagcgccggtaatggtgtggcgtggtggcgcagcagctcgagcagttgttcatcgctggtttcggtagggcgttggcgtgatcggatcatggccgcgtctcctggtctgctcttaccgatgaccgacgctggatgcccctgttcagaccgttcggcaggtcgtccgaacaagcgtaagcggcagaactgaacccgacgggctagtctctaagcaaggcgacgccgatatcggcaaacgaattttgccgaaggcgctagaacaagggggtagtcatgacgacctggatcatcgcgtacagcaaagacggcaatacatctatcatcaggaccgagtccgatcaccagccggatatagacgaggcagtagcgctggttacgcaaaaggcggaacaggagtttgccggggaggaagatgcctacgagcatgatccggatatagaggaaacgccggcgacccgtctggccgagcgcttcggcatcaccgtaaccggaatctcccaggcctgattgccgatcaggtcacctgccacacttcaccatctccaaccacgaacagacgccgacccgggttggcgtcgacctccagcatgccggtgaagccgccgaaggcgggcagcaggctcagtcgttcgccaatgcagaagcagggcaggcgcaacgactggcgcccgcgtccgttcaggcggaatgccggatgcagatggcccgcgagaacgtggtgggtggggtgcggatcgggttcgtgctgcaaggcgaacggaccgagcagcagcggctcggggacgacggtcatgcccagcgtaacgggcgggtcaccggctcggcggtcgtgattgccacggataagcgtgatcgccagcgaggcgtgatcggcccgccattgatgcagccgagccagaacagccggtgtctgggattcgggcgcgtgcaggaagtcgccaaggaaaatcagctggcggcagctgtagcgcgccaataacaggtccagacgtagcagattgctttgcgtggtgccgtgcggcaccggttggccgagccggcggtacgcggccgctttgccgaaatggatatcggccaccagcagcgcctgttggtccggccagtagatggctttgtcgccgagcagccatagctcggtctgttccagttcgatggccaggtgcgaagtcatggcggcagtgtagcggcgttcggctgcgcgcccaatccggttgaacgcttccatgacctgtgcgcgacccattccccgcggggtcgcggctcccacgactggggtgggtcgctgctgactgtgtgggaggcccgccctcgggccgaagcttttgctttggagggggtagaagatctgctttcgccgcgagggcgcgcctcccacgggctgtggtgcgccgttgctcttcgtgagaggtccgcgtcggggcgaagcggttagggtttccgctttttcaagcgcggcgtgccgtccttggtggcgcgcggtttgcgtttgggggcggtttcgcgttcgaccgcaatacgggcgtccgcttccggctggtagccgccgggcccggcggccttgtccaggtcggcgaccatgcggcggatgcggtcggccagtttttccgaggtcatgctttcgcggaagcgctcgaccatcaatgggaaggccagcggcgtggtgcgtttgacgacatgtacgtccagctggcgttgctgcaaacggctcagggtctgctccaggcgctcgacctccagttcctggcgcagcacttcttcctcggcctgggtcagcagcaggttggccgggtcgtactggcggaatacgtcgaagaacagcccgctggacgcctgcagctgccgcgcgcttttttgcgcgccggggtagccggaaaacaccagcccggcgatgcgcgcgatctcgcggaagcgccgacgggccagctctccggcgttgaggctggcgagcacgtcgtgcagcaggtcgtcccgactgaacagcgccggcgtcagccactgcagccaatccacttcggtcgccgagagcagttcgaaaccgtagtcgttgaccgcgatggaaaaggtcagcggctgtcgttggcccatccgccacgccagcagactggccaggcccaggtgcacgtggcggccggcgaaggggtagaggaacagatgccatccctcgcgcgacttcatcacctcggccagcagcgtggtttcggtgggcagcgccgaccagtccagttgtacccgtagcagcggctcgaccagttgcatctcgacgctctcgaaccggccacgcgacgccgcaccgagctgctcgaccactgcgtcggccagttcgctcgacagcggcatgcgcccgccattccagcgcggcacggcggccttcctgccggtggcgcggctgacgtaggcggtcatgttctcgacccgcaccagctccagcagccggccgccgaagaggaagttgtcaccggggcgcaatcgggcaatgaagccttcctcgatggtgcccagcgaacgaccgctgccgcccttggcccagaatttcaccgtcaggctggcgtcgctgacgatagtaccgatgctcattcgatggcgcagggcgacgcggcggctggggactttccacaatccagtatcgtccggctcgacgcgctggtagtccggataggccgtcagtgaatgcccgccgtggcggacgaaggccagcgcccactgccaatggtcttcggtgagatcgcgataggaccaggcctgacgcacttcggcgaacagctcatcgggccgaaagccgccgccgagcgccatgctgaccaggtgctgcaccaaaacgtcgagggggcgatgcggtgcgctgcgggcttcgatgcgacgctcggcgatggccacctgggcggcggcggcttccaccacttcgaaactgtgcgtcggcaccagcgtgacccgcgacgtccgaccgggcgcatgtccggagcgccccgcgcgttgcatcagccgcgccacaccttttggcgagccgatctgcagcacccgctcgaccggcaggaagtcgacccctagatcgaggctcgaagtgcagaccacggccttcagcgcgccttgcttgaggcccagttcgacccagtcgcgtacctcccgcgccagagagccgtggtgcagggcgatgagtccggcccagtcgggacgcgcttcgagaatcgcctggtaccagatttccgactgtgaccgggtattggtgaagaccagcgtggtagcggccgaatcgatctcctcgaccacctgcggcagcatgcgcagcccgagatgaccggcccaggggaagcgctcgatgcttggcggcagcagcgtgtcgacgcgcaggtccttgtcgaccttgccttgcaccagcttgccgtcgccggggtatagcaacacatccaatgcgtgcggctgattgcccagggtggccgacaggccccagacgatcagctccggcatccactggcgtagccgcgccagcgccagctgcaactgcacgccacgcttgttgcccagcaattcgtgccactcatccacgactagcatgcgcaggccggcgaatgcctggcgtgcgtcggcgcgggtcagcagcagggtgaggctttccggcgtggtgaccagtgcggacggcaacctccgaccctggcgcgcccgctcggcaccactggtatcgccggtgcgcagcccgatgctccagttgatgccgagatcatccagcggggcctgcagggcgcgggccgtatcggctgccagcgcgcgcatgggggtgatccagaggacggtgagtggggcgggcttgtccggcgtctgcgatgcgatcgcgggcaagcccgctcccacggaagcgaaacgatcgagtgcgcccagccagacggcgtaggtcttgcccgagcctgtggtggcgtgaagcaggccggattcgcctcgctcgaccgcttgccagacttcgcgttgaaagggaaagggctgccaaccccgactggcgaaccagcgttcgctcaggaggccgggtgcgtcattcattggccagcctcttggaggtgggccacgcgcgtatacccgctagcagcgcgtgtcgcctggcacaccgtgcccgttcgcggtcgagaccgctcccacggtgcgggtgggttgctcggcttgtgggagcggtcttgaccgcgaaaagagggctgctcatgtctacggagttcggaccgatgcttatgcgagctgctctgtccggtcgcgttcttcgcatagcaacagctgtcgctatgctccgtgcccgttcgcggtcgagaccgctccctcggtgcgggtgggttgctcggcctgtgggagcggtcttgaccgcgaaaagagggctgctcatgtctacggagttcggaccgatgcttatgcgagctgctctgtccggtcgcgttcttcgcatagcaacaactgtcgccataccccgtgcttattcgcggtcgagaccgctcccacggtgcgggtggattgctcggcctgtgggagcggtcttgaccgcgaaaagagggcagctcatgcctacggaatttagaccgatgcttatgcgagctgctctgtccggtcgcgttcttcgcatagcaacagctgtcgctatgctccgtgcccgttcgcggtcgagaccgctcccacggggtgagtggattgcttggcctgtaggagcggtcttgaccgcgaaaagggggctgctcatgcctatggagttcgcaccgacgcttatgcgagctgctctgttcggtcgcgttcttcgcatagcaacagctgtcgctatgccccgtgcttattcgcggtcgagaccgctcccatggtgcgggtgaagtgctcggcctgtgggagcggtcttgaccgcgaaaagggggctgctcatgcctaccgaatcgggctcggcgcttatgcgagcggctctgttcggtcgcgttcttcgcatagcgacaactgtcgctatgccccgtgcttattcgcggtcgagaccgctcccacggtgccggtggaatgctcggcctgtgggagcggtcttgaccgcgaaaagggggccgctcatggctacggagttcggatcgatgcttatgcgagctgcgctgttcggtcgcgttcttcgcatagcaacagctgtcgctatgccccgtgcttattcgcggtcgagaccgcttccacggtgcgggtggactgctcggcctgtgggagcggtcttgaccgcgaaaagggggccgctcatggctacggagttcggatcgatgcttatgcgagctgcgctgttcggtcgcgttcttcgcatagcaacagctgtcgctatgccccgtgcctgttcgcggtcgagaccgctcccacggtgtgtgtgatgtgcgcggcctgtgggagcggtcttgaccgcgaaaaggaggctgctcatgtctacggagttcggaccaacgcttatgccaggggaatgctctgccagtcatcccaacaattccttcagcgtttccagcgtgtcggcttcatccaccggtttgtcgaggcgccagcgcagcatgcgcgggaagcgcacggcgatgccgctcttgtggcggctgctggcggcgatgccttcgaaaccgagttcgaacaccagagtcggcgtcacgctgcggaccgggccgaacttttccacggtggtcttgcgcacgatggcgtcgaccttgcgcatctcctcgtcggtcaggccggaataggccttggcgaagggcaccagtttgcgttcgggatcgcccggttcgccgtcccaaaccgcaaaggtgtagtcggtataaagactggcgcgccggccatggccgcgctgggcgtagatcagcacggcgtcaacggagtacggatcgatcttccacttccaccagacgccgacgtccttggtccggccgacgccgtactgggcggcgcgggccttgatcatcatgccttcgacgccgcgcgcgcgcgacgcttcgcgctgttgcgccagatcggcccaatcgtgaccggtcaccagtggcgagagcatcagccgcgggttggggcagctggcgaccaccttttcgagctgctgccggcgctcacgatgttcacggtggcgccaatcgtcgccctgccactccagcaggtcataggcgaggacggccacgggcgcgtcctgaagcaccttggcggtcaggttcttgcgaccgatacgctgctgcagcagggcgaaaggctgtacgccaaagcgctcggtgtctcccgcatcatcgccactcggctgctcgaaaagttctgtcgcgggctcgccgggtgcgtgcttccagaccaggatctcgccgtcgatcaccgtgccgtccggcaggcagccggccagttcgcagagttccgggaagcgctcgctgaccagttcctcgccgcgcgaccagacccaaatctgcccgtcgcgcttgaccagctgggcgcggatgccgtcccacttccactcgacgagccagttctccggcgcgccgagcagcgtatcgaacgcttccaccggcgcctgcaacgggtgtgcgagaaagaacgggtagggctggccgccgcgctgggcatgctcgtgttcggattcgtcggcgatcagtgcacggtagccctcggcgctggggcgatgggacagatcggtgtagcccaccagccgctgcgccacgcgtttgggatcgaggtcgaccagcgaggccagcgcccgcgtcaccagcagtttcgatacgccgacgcgaaaagcgccggtgatcagcttgatgcagaccatcaggctgagccgatccagctcggcccagagtgccggcagacgttcggtcagctcttccggtggcaggccgcgcaggggcagcagcttgtcctgcatccacacggccagcccgtcgtcggagctgtgttcggcctcgggcatcaacagcgagatggtttcggccatgtcgccgaccgcctggtagctctcctcgaacagccattccggcaagcccgaggcctgcatggcggtttcgcgcagcacgcgggtcggcaccagctgacgcggtcggccgccggcgaggaagtacacggcccaggccgcatcggccggatcggcgtcgcgaaagtagtcgcgcattgcggcgagcttggcgttgctcgaggtggtggcgtcgaggcggctgtagagggtggcgaaggctttcatcgggtgctctgacgacgtagcgttgctattcagacgccagggcccacgaggggttcgtgtggttgtccgtttcgcaacggtggtcgtccgttgcgcctgcgcggcgaggtatctctcgcggcgatgctgtgctgccagccacttggagcactgtcatgttgaaatgtcctcagaacaaatatcgcccgttcccctctgtagagctgccggaccgccaatggccggcgcgcacgctgacgcgcgccccgcgctggtgttccactgacttgcgcgacggcaatcaggcactgatcgagcccatgagtcccgaccgtaaggcgcggtttttcgatctgttggtcgcgatcggtttcaaggagatcgaggtggcgttcccctcggcctcgcagaccgacttcgatttcgttcgccagctcatcgaacagcggcgcatccccgaagacgtctgcattcaggtcatcacccaggcgcgtgaagatttaatccggcgcaccttcgcctctttgcgcggggcgccgcaggcgatcgttcatctctacaacgccacggcaccgctgtttcgtgaagtggttttccgccaggacaaggccgcgaccattgagctggcggttaggggcacacggctgatccgtcaactgtgcgaggagcaaccgcagacccgttggacctacgaatactcgccggaaaccttctgcttcaccgagctggagttcgccttggagatctgcgaggcggtggccgaagtctggaagcccgacgtgaatcgaccgtttatcctcaacctgccggcgactgtggaggtatcgctacccaacgtctacgccgaccagatcgaatggttctgccggcggttcggaacgcgcgaggcggtgattgtcagcgtgcatccgcacaatgaccgggggacgggggtggcctgtgccgagcaggcccagctggccggggcccaacgggtagaaggctgcctgttcggcaatggcgaacgtaccggtaacgtcgatctggtgacgctggcgatgaatctctacacccaggggatcgatccggggctggacttttccgatatgcgcgaagtggtgcggcaggtggaggcctgcaaccagttgccggtccatcctcggcatccttacgcgggtgagctggtgttcaccgccttctccggctcgcatcaggacgccatcaagaagggcttcgcggcccaggccgagcggagcgatggacgctggtgcgtgccctatctgccgctggatccggccgatgtcggctgcagctatgaggcggtcatccgggtcaacagccagtcgggcaagggcggaatcgcctggctgctggagcaggatcacggcttgaggctgccacgccgattgcagatggaattcagccgcatcgttcagcagcaggcggacgaaaccggccgggaacaatcctcggcgcagctctggcagctgttccggcaaacatatggattgcacgggcaggccgagctgaacctgctcgattatcgaatcagcgggtctgcagatgccgaccagttgcatgtatttgctgggcaggtgcgctaccgcggcgaggtgatttcactgcaggggcagggcaacggtgcgttgtctgctgcggtcgacgccctgcgcggtgccttcgacctgcagttggaaatcctcgactatcaggagcacagcctcggcggcgagaccgccagccgcgcggtgagctatgtcgagtgtcgaggctcaggggagcaacggttgttcggggtaggtatagatggcgatgccacggcgtgcgcgatacgtgcgctgatcagcgccaccgcgcggttgttgcaggcctagccatcctcgacgccatgcgccggtgtgctgccgaagtaatggctgggcggcacccccagggtccgtcgaaacatggcgctgaaggcgctgggactgtcatagccgagatccagcgccacctcgatgatcggatgcccggcggccagcgcgtcaaggccggcgagcagccgggctcgttgcagccattggctgaaactcagcccggtttcgcgctggaactgacgggtcagcgtgcgtccgctgatggatagccgctctgcgcttcgctgaaggctccagtcctctgccggccggcgacggatgtcccggcatagctcggccagtaccgggtcgatcggcaatgggacgtggagtgcaagaatgggcagcacacgcagctcatccaggatcaactccatgatccgttcttcccgaccgccggacgggtaatcgggcgcgacctgcatggcggcgatgatcaactggcgcagcaagggggaaatatcgacgacccggcaggccgacggaaggtcggccctggccaggctgtcgacgagcagggtgcgcatgcgcacctgtccggccagcttcagatcgtgctccacccgtgccggtagccacacaccgcggcccggcggtaccacccaggtgcccagcgcggtatttaccgtgaccacgccactcaaggcatggatcagttgggcccgggcatgcctgtgggccggcacgcgttcgccatgcgcataatcctgggcgatggcgcacaccgggctggcgaaggaatcgtcgaatggatcgtgaagcatcgggacgggtatctcttggagcgaatcgccattgtgccccagatacttagcgagcatcactcgtagagccttcgctgccgtccaccgtggcggcatcgtcctcttcaccgtattcggtctcgaaggcctgggcgtcgaggccgcgcatttcgcgcaggtagcgcaccagcaccggcaccgagccgtgggtcaccatcacccgctcggcgccggtctgctcgatggcccagagcaggccgggccagtcggcgtggtcggagagcacgaaaccgcggtcgacgccacgccgccttcgcgtgccgcgtagcatcatccagccgctggcgaaggcgtcggcatagtcgccgaacctccgcatccaggtgctgccgcccgccgacggcggcgcgaggatgatggcctgcttcaggcgcgggtcgccttttttcaggtcgccggcatagacggtcgggggcaggtagatgccggcttcgcggtagaccttgttcagcggttcgaccgcaccatggacgacgatggtgccgatgctttcatcgagcccatgcaggatgcgctgcgccttgccgaaggcgtagcagaacagcacgctggcgcgcccggccgcggcgttggcgcgccaccagtcgttgatttcgcggaacacctcggtctgcgacggccatttgtagatcggcaggccaaaggtcgattcggtaatgaaggtgtggcagcgcaccggctcgaagggcgcgcaggtgccgtccggttcgaccttgtagtcacccgacgcgacccagacctcacccttgtattccagccgcacctgcgccgagccgagcacgtggccggcggggtggaagctgagccttacgccgtgatgctcgatggattcaccataggccagcgtctgcagcggcatgtcggcggcgatgcgtgagcgcaggatgccttcgctgtcgcgggaggccaggtagtggcccatgccccagcgcgcatggtcgccgtgggcatgggtgatgacggctcggtctaccgggcgccagggatcgatgtagaaatcaccgggcgggcagtagaggccttcggggcgggcaacgacgaggtccatggatacaggcactttgcgggcttgtagggttggagcacggcgcagcgctgcgagttcgcttgggcgagtggtgcgccttggcgaagcccgctgcggggtgaagcttttacgtcagatggggcagtagaccctgcattcgccgcgaaggcgcgactccacggggcggggggccaatgctctggcggatgggctgggtggcgttccgctgcggtccgccaaacactggatgcggctatcaatccaccagtttcagatgcgaggtatccggcggtggcacgtcactggcgcggcggcgctcgctcatgtcgctgcccaccggcgccaggctgaactgtgagagatccactgccgggggcacggcttcgggacgggcgtcctgcaggtcggcacccgctggggcgatgccgaaatcgggcgcctggacgtcgacgaaggccgccatgtattcgtcgcgtggggcgacctgcaggggtttgcgcgccgcaccgtccggcatggctgtcggtgctgcaggctcctgcgcaggcggcggggcgagttcgatctcctcgacttccaccggcatcggccggacctcggcgatggcgccggcgcgcgccatggcctggcggtacttctcgacgctggcatggtcgaggtcctgcttgatcacgatgcgccggccggagaacagcaccgcgatccgctgggcgtcggcctggaacagacgagccagattggcctcgacctgctcgagggtcgcgcctggggcgagctcaccggaaaacgagatctcgtagcggctcatgattctgggtcctttgtctgggcagcggcgattcggtgatcatagtggctgcgatgggtgcatgaaagtccgcttcgttagcagcgtcacgccttcggcaaacagcgcacacgaacgcgaacgaccgaagctatcgctgtccggcgtcagctcctcgatggctggctgggcgataatgcgaccccggcgattgcctgctcaacctgctaacccaaggatcgcgaacatggtggtattcgaaatcaagcccctcaatcccgaggcctatcggcaacagacgcgtcgcagcacgctggtggtagtggcgaccttcgcggtgctggcgatggggctggccgcgctggccgtcgcgctgttcggcgagccgggcgcggacaacctgcgctggaacatcgtcggtgtcgtgctcgggttgctgctgaccgccgcgctggtgcgcttcgtctattggacaaagccctggatggccagcgccgcctacggttggaaactcaaacgcagcctgatgagcgtgaccaacctcatgcaccacgtgacggcgggggtagaggcgggcgatcccgaggcgatcaagctgctgcgcttctatcacctcggcctgacacagatgcatcagctcgatggcaacagtgcgtcgcttggagaggtgcaacgtgacatcgaccggcaccgcgacctgatggaagcacgtgggctggaccccgatcagcgcgccctggatgacgcctggctgggctcggtgaggcgtttcgccgcgctgaaatagcgcaggcgccccgcgcggtcgctgtttcgtcgtgcctcggcccggcgggctcgttccgcgccgggttcaggccccgcggtggcggcccgtgcatgcgtcaatacctgcgcgttgcgctcgcatatgactggttgcaagcccgcggaatatccatactcagcagctgttcgagccggcccatgccggcttcggtggttcgctcagcctcaggccaaggaatatccaaacgatgaaaccgctgtatctgcttggcctgatggccggcctgtccctgcaatcgattgccgccgagcctccatcccctttgctggacgacaaaccggccttcatcgccagcctcatcgagaagatgacgctggatgagaagatcggccagctgcgcctgatcagtatcggtggcgacatgccgcgcgagcgcattctcgaggagctggctgccggccgcattggcggcaccttcaataccgtcactcgaggggacaaccggccgatgcaggaagcggcgttgcgcagccggcttcacattccgatcttcttcgcctacgacgtggtgcacgggcaccggaccattttccccatcggcctgggcctggcgtcgagctgggatctggaggccatcgccaccagcggtcgcgtgcaagccatcgaagccagcgccgacgggctggacatgacctttgcgccgatggtcgacatctcccgcgatcctcgctgggggcggacatccgaaggcttcggcgaagacccttacctggtgtcgcagatcgctcgtaccatggttcagggctatcagggcaaatcaccggccgcggcggacagcgtgaccgcgagcgtcaagcatttcgcgctctatggtgcggtggaaggcggccgtgactacaacgtggtggacatgagcccgatgcgcatgcaccaggacttcctgccaccgtatcgcgcagccatcgatgcgggggcgggcggcgtgatggtcgcgctgaactcgatcaacggcgtgccggccagcgccaatacctggctgttgcaggatctgctgcggcgcgactggggcttcaagggcgtcgcgctcagcgaccatggcgcgatcagcgagctgattcgccatggcgtggccaaggacggacgcgaggcggcgcggctggcgatcaaggccggcatcgacatgagcatggccgactcgctgtatctgcaggagctgccggggctggtgaattcgggcgaagtcggtatcggcgagatcgatgcggcggtgcgcgaggtgctgggtgtgaagtacgacatggggctgttccatgatccgttccgccgcatcggctcggcgaaggatgaccctgtcgacgtcaacgccgagagccgcttgcaccgcaaggccgccaggggagtggcgcgccagtcgctggtgctgctggaaaaccacgaccgcacgctgccgctggccaagcgcgggaccatcgcgctggtcggcccgctggccgattcgccgatcgacatgatgggtagctggtccgccgccggcgtcgccaagcagtccgtcacgctgcgtcagggcatgctcgacgcgctgggctcgaaagccgagctgagctatgcacggggcgccaacatcaccgatgacaaacacatggtcgactacctgaacttcctcaactgggacaacccggaggtggtgcaggacccgcgctcgccggcggacatgatcgccgaggcggtggctgtggccgagcgcgccgatgtcatcgtcgccgcggtgggcgaatctcggggcatgtcccacgaggcctcgagccgcaccagtctgcagattcccgagagccagcaggcgctgctgagggcgctgaaaaagaccggcaagccgctggtgctggtgctgatgaacggccgcccgttggatctgaactgggccaaggcgaacgccgatgcgatcctggaaacctggttcagcggcaccgaaggcgggcacgccattgccgacgtgctgttcggcgactacaacccctccggcaagctgccgatatccatcccgcgctcggtgggccagatccctacctactacaaccacctgcgtgtcggccgcccctatgtcgagggcaagccgggcaactacacctcgcagtatttcgaagagcaaaccgggccgttgtatcccttcggctatggcttgagctatagccagttcgagttgtccgggctgcggctgtcgagcccgacgatggcgcgcaacggcgagctggacgtcagcgtgacgctcaagaacgccggcccgcgggacggcgccactaccgtgcagttataccttcgtgacgaggtggcctcggtcattcgcccggtcaaggaactcaaggcatttcgcaaggtcgccctcaaagcgggagaggcacgtgagatccgcttccggctcagtgagaatgacctggcattcgtcaacgcacagttgcagcgcgtggccgaaccaggcgagttcgaggtgcaggtcgggctggattcggagcaggtggagcatgccagcttcaccttgcagtgagcctcttcgcagcttgtcgcccgggccgtgctgaagcctgaaaaagccttcaacgagtagctatccggcgcttgtgcggcatgggatgatttgccgcttcgcttgttcgcgcagggaatcatttcccgttgcggtagaccaacgagggcaaaccgggccgcaaagcggccagcggtaatcgtgatagctcaggaggcgatgtgtcacgtacctttcaactcgaaacaggcgctcgcagtagtcgagcgctccgaatgacgctgagtgtgtgcctggggctgttcgccagttccagctgggcattcagcctcgacgatgtggcaaccaaggctgaaaagctcgcagcgcaaggctacgaagcaccgaagagcaacctgccgccagtctttcgcaacatggcattcggcgactatcaacagctgcgttttcgcggcgacaaagccctgtggcatgacgcgccgacaccgttcgagctgcagttctaccatcagggcatgcacttcgacgtcccggtgacgatcaacgagatcaccgccgacggcgtcgaggaaatccgctacgagcccgagatgttcgatttcggcaaggtagaggtcgatcatgctgcgctggagaacctcggtttctccggcttcaaggtgctttatccgctgaacaaggcggacaaggccgacgaactcatgacgctgctcggcgccagctatttccgcgtggtcggcaagggccaggtgtatggcctgtcggcgcgcggcctggcgatcgacacggcattgccgtcaggcgaggagtttccgcggttccgtgagttctggatcgagcggccaaaggccgatcggcgcaacctggtgatctatgcgctgctcgattcgccacgtgccactggcgcctatcggctggtggtcacaccgggcaaggacagcaccgtggacgtgaaggcgcgcgtctatctgcgtgagcctgtggaaaagctcggtatcgcggcgctgaccagcatgtacctgttcggctccaaccagccgagcgacctgctcaactaccgcccgcaactgcacgattccgaagggctggccattcacaccggggccgacgaatggatctggcgcccgctgaacaatcccaagcgcttggccatcagcagtttcagtgtcgagaacccgcgcggtttcggcctgcttcagcgcacccgtgacttcggccgctacgaggatctggacgaccgctacgacctgcgtcccagcggttgggtcgagcccaagggcgactggggcaagggacgggtcgaactgatcgagattcctacgcctgacgaaaccaacgacaacatcgtggccttctgggtgccagatcagcgccccgagcccggtcagtcactggacctcgactatcgcctgcacttcaccatggacgaaccggcagtgcacgatcctgcgttggcctgggtccagcagacgcggctgtccaccggcgacgtcaagcactcgaacctgatccgcgagccggacggcagcactgcgctgatcgtcgacttcgtcggcccgaacctggcggagctgccggcggacgcgccggtgagcactcgtgtcagtgtcgacgacaatgccgaactggtggaaaacaacctgcgctacaacccggtgaccaagggctggcgtctgaccttgcgtatgaagatacgcgacccgaaacgtccggttgaattgcgcgcagcgctggtggatggcgaaaagacgctctccgaaacctggagctatcagattccgacccatgaataatccagtggagtcttcgcttacggacgactatgtcggccagctgccgatcgatgccgagcaacgtcaggcgctgactcgcgaggtcgaacaggccggtggcgagctgccggccgtgcatcgggccctggctcacagtggcccgacggacggagccgaatcggagggcgatgagttcctggcttcggtcgccgcgcggctgaagctcggctggggcgataccctcgagcgtgccaaggcgctggcgagcgaccatcagggacgcacctgcatccgctcgacgccgcccatcgtgcgcacccggatggtccccgagccatggcacaccaacatattgcggctcagttggtggcgcttcttgcgcaagaagaaccgcaccgtcgagatgccgccgccccagctcgtggatcgatcgggctggcgcaaggtggcagccttccggcgcacgacgctgctgatcctgatgctggtgcaaaccgtgatcgccacttggcacatgaaatcggtactgccgtaccagggttgggcgctggttaatctgcaggaggtgttcgaccagccgctgcaggagtcggcgcggcagattcttccttacctggtgcagaccagcattctgttgctgttcgcgttgctgttctgctgggtttcggtgggtttctggacggcgctgatgggcttcttccagctgctcaagggccatgatcggtacaacatctcggccagcaccctcggtgacgagccgatcccccgtgaggcgcgcaccgcgctggtgatgccgatcgccaacgaagacgtgccgcgggtgttcgccgggctgcgcgcgacctatgaatcgctcaaggcgaccgggcagatcgagcacttcgatattttcgtcctcagcgacagtaacgatcccgatacctgtgttgccgagcagaaggcctggctggaagtgtgccgggacgtcgacggcttcggccatatcttctatcgccgccgtcgtcgtcgggtgaagcgcaagagcggcaacatcgacgacttctgccgtcgctggggcagtagctatcgctacatggtggtgctcgatgccgacagcgtgatgagcggtgattgcctgaccagcctggtgcggctgatggaagccaatcccggtgccggcatcatccagaccgcgccgaaagcctcgggcatggacacgctgtatgcgcgcatgcagcagttcgccacccgggtctatgggccgttgttcaccgccgggctcaatttctggcagttgggcgagtcccattactggggtcacaatgcgatcatccgggtcaaacccttcatcgagcattgcgccttggcgccgctgccgggcaagggcgccttcgccggcgacatcctgtcccacgacttcgtcgaagcggcgttgatgcgccgggccggctggggcgtgtggatcgcttatgacctgccgggcagctacgaggaattgccgcccaacctgctcgatgagctgaagcgcgaccgccgctggtgccacggcaacctgatgaacttccggctgtttctggtcaagggcatgcacacggtgcatcgtttcgtgttcctgacgggtgtgatgtcgtatctgtcggcgccgctgtggttcaccttcctggtgttgtccacctgtttgctggcgatccatacgctgatggtgccggagtatttcctgcaaccgaaccagctatacccgctttggccacagtggcatccgcgggaagccatcgccctgttttcggcgaccctgaccctgctgttcctgcccaagctgctcagcgtgctgctgatctggattcagggcgcgcaggaatacggcggacggatccgggtactgctgtcgatgctgctggaaagcctgttttccatgctggcagcaccggtgcgcatgctgtttcacacgatattcgtgacggctgcgtttctcggttggtcggtgcagtggaattcgcctcagcgtgccgacaatgccacgccctggggtgaggcattgcgtcggcatggctcgcagatggtgctgggcgtgctctggacggcgctggtgggctggctcgatccggcttttctgtggtggttggcgccgatcgtggtgtcgttgatcctgtcggctccagtgtcggtacttaccagccgcaccgggccgggtctggcggcgtttcgccgtaagctgttcgtgatccccgaggagttcaatccgccgcaggagctggcctcgaccgatcgctacacacgccagaatcaggacaatgccctgcatgacggcttcctcgcggcgacggtggatccaatctacaacgcactggtctgtgccatggcacgggcgcgtcacgccaagatcgtcccaggcgccgagcagttgcgcgagcagcgcatgcagcagattctcgatgccggccccaacggagcggccgaggccgcgcgctggcgtttgctgaacgatccggacgggatggcgcacctgcaccaacgggtctggcaggacgatcgctaccaggcgtggcgtgaggcctaccaaaagccccagcagccggaaacgccctgaccgccaagctcgcggtcgagaccgctcctacagttgcatggaagctcccatagctggcctgatccatgaggacccccgtgggagcggtcttgaccgcgaaaaaaactcctccgtcggcgttgtggcgctcggtcaaggagggggctgggtgtcatgactggaccaacgacccgccgaggccgtgcgtgcgctagacgcctggaggagctcgcggtcgaaaccgctcctacgggtgacgtagtcgtagaggagttgtgggagcggtcttgaccgcgaaaaaactcctccgtcggcgttatggcgttcggtcaaggaggggctgggtttcatctagcccagcggctcgccatgccgtgcgtgcgctaacgtctggaaagctcgcggtcgagaccgctcccacaggtgacctagccgttgagtaatttgtggggagcggtcttgaccgcgaaagaaactcctcagtcggcgttatggcgttcggtcaaggaggggctgggtgtcatggctggactagcgactcgccatgccgtgcatgggctgaacgctggaaaagctcgcggtcgagaccgctcctacgggtgacgtagccgtagaggagtttgtggggagcggtcttgaccgcgaaagaaactcctcagtcggcgttatggcgttcggtcaaggaggggctgggtgtcatggctggactagcgactcgctgaggccgtgcgtgcgctagacgcctggaggagctcgcggtcgagaccgctcctacaggtgacgtagccgttgactagtttgtgggagcggtcttgaccgcgaaaaaacctcctctgtcggcgttatggcgcccggtctatgaggggctgggtttcatgactgcccaacgacccgccgaggccgtgcgtgctctgaacgctggaaaagctcgcggtcgagaccgctcctacgggtgccgtagtcgtggaggagtccgtgggagcggtcttgaccgcgaaaaaacgtggaaggcttccacgattggtctactcgtggacgtccccgtgggagtgttcgctgccgtcggcatggtgatgcacgtggggggtgttttgcggttcggccagttgatggacgtcagccggttgttcgccagcgtggccagcatgttcgccggcatgcgggtggtcgccagaatgcggcatcgattcgccgcccccgtgttggtggccttcgctggtggctatcagcgtctggtattccagcgcagtcagcgacggcagctgctccagcaaagcgaccagaccccaaatgtatggatcggacatgcttttgccccaggcgggcatgccgctggatctgatgccatgtttgatgacccagaagtcgctggccgggtcgtgggtgcggttggggttggtgaggttcggcggcgatgggtagagattctggctcagttccgtgccgtccatgccgggggcgagatggcagccgacacacatggcgtcgtagttgcccgctcccgatcggatcaattgcggatcgcccagatccggcgtttcgatcccgctggcacgggttgcgatggagcgctcgcgaacggtttccagcaaagtatggagcgatgggctatggggtcggtcggcggcgacgtcgatcaggccggaatacaccacgcccgctccgatcaggatgaaaacgaaggcggccagcagcaatgtcgtcagggttttaagcattattcggcgtgttctcagaaccagaatcggactcccgccaccaggcgggcctcgtttgtgtcttccccttcggcacgccgtaggtcggcgctgtcgccgtaagcacggctccagcttactcccaggtagggtgcgaattgtcggctgatttcgtagcgcaagcgcaatcccgcgctggcctcgctgagacccgagccgacaccgcgtgattcgtcattgctgccatacaagttaagttcggcagtgggctgcaacacccagcgctgtgtcagcagaatgtcgtaatcggcttccaggcgcagcgcggtctggccaccctcgccgatgaaggccgtgacttcggtttccaacccatacagcggtgtgccctgcaggccgaacgtcgcccaggtttgcggtgagccgggttcgaaatcctggcgaattccggctacggtctcccaccaggggctgacggcatggctccagaggagctgcagctcggcctcttcggtgcggccgttgctgtgttcgccttcggagcggaacgccaagcgatcgacgtcaccgccgaaccaaccggagagatcccaggccagcgcactgccgtcgtcggcatcctgccattccagccgatcggcgaggacaaaaaagttcgagccgccctgatgcatctggtgcggcggcaagtcggggaacgccgcggcgcggtccgtatcgcggagcgtcgggaccggcgagcgggtttcctggcctggcggaatgccggttgccggcggacgcgtggcagagccttgtgatacggagccgtgcatatcgccgtgacccaaggcgtcatgatccgaggccccgtgatgcatggcctcgtggttcatctggccatgattcatctggctgtgatccattggcgcagcatgaccggcatggtccatggcttcctgtgcctggctcgtcgcggcggccagactcagggcaatggcaagaggcagtcgcccggatcgtgggacgagcgcctgccacgcctgggcgctgtgcttggatcgcccatcagtgatcatgctgccggccctgttcagcgccctttggcatgtcgtgatccatctggccgttgcccatgttgccctggtccatgtgtccatcgcccatgtggtcgtcgtgcatttgcatcatcttgtcgtgatccatgccctgcatcatgccgccttgctgcggcttgggttgcgttgcgtgcggggcggcctcggcgctgggtgcttcctcggggcgatgtccgtcgtgttcgttttgcgcaggggcggcgctcagttgtagggcggcgaacaggccaaaggcgagcagggtgttttgctggaacgtagtcatgaggctctccttcattcttcaacgcggacttcacggaacattccgaggtccatgtgcatcagcatgtggcagtggtaggcccagcgaccgagggcgtcggccgtgacgcggtagctgcgtctggcgccgggtggtatgtcgatggtgtgcttgcgcaccttgaagttgccctgttcgtcttccaggtcgctccacattccgtggagatggatggggtgatgcatcatggtgtcgttgaccagcacgaagcgcacccgctcgccgtaggtcaggcgaaccggttcggcatcggcataggggatgccgtcgaacgaccaggcaaaacgctccatgtggccggtcaggtgcagttcgatggtgcgtgtcgcctcgcggccgtccgggtcggggaaggcgctgcgcaggtcggcataggtcaggacacggcgcccgttgtcgcgcagtccgatgccggggtcgtccagtttggcgaccggcatcatggtctgcatgtccaccagcggattgccggtttcgctggccgggtgggtctgcatcgggctgctgctgatggcaccgccatggtccatggccgaatggtccatgccggtcattcccgcatgattcatttgcccatgatccgtttgcgagtggcccatctgcgcgtggttaatctcaccgtgattcatcgcttcgtgcccggtggcgggctgcgcgccgccggcaccatgcgagccgtgatcgccatggcccatgtcgctcatgctcagttcggggcggggatcgggttgcggtaccggtgcgctcaggccttggcgcacggccagggtgccgcgggcataaccgctgcggtccatggactgggcgaacaaggtataggcgtcctggctgccatccggggcgacgatgatatcgaccgtttcggccacggccaggcgcagctcgtcgacctcgaccggttcgacaagctgaccgtccaccgcgaccacggtgagcttgaggccagggatacggaagtcgaagtaggtcatcgccgagccgttgatcagccgcaggcgaatgcgctcgccggcttcgaacaggccggtccagttgccgtccggcgcctggccgttgagcaggtaggtataggtttcaccgctgacatcggcgagatcggtcggcgacatgttcatcttcgcccaggcccagcggttgcttagcgtgtcgctccagccctggtcggccacgtcatcgatgaagtcacccagcgtgcgccggccgcggttgtagtagtcagcctgttttttcagcttggccagcactcgcgcggggctctcgtcggtccagtcgctgagcatcaccacatagtcgcgatcgtaggcgaatggctccggctccctgggatcgatgatcagcgggccatagacgcctagttgctcctggaaggccgaatggctgtgataccagtaggtgccgctctgcttcacttcgaagcggtattcgtacaggccgcccggtgcgatgccggcaaagctgaagccgggcacgccgtccatgttggccggcaggacgatgccgtgccagtggatcgaggtgtcctgcggcaggcgattgcgcacgcgcagcgtcacgatgtcgccttcgcgccagcgcagcagcgggccgggaatgctgccgttgatggccatggcggtgcgctcgcggccactgaagttgacgctgagcgagtcgatggtgaggtcgaattcggtgccggacaaaatctcgtggtcacccgtctgaccgggccggtccagcgcccacacgggctggcgccacgcgcccaagccagcgacgacgctgcctgctgcaagggtcttgatgaaggttcggcgcgacgctatgggctgcatgatgttcctgtcggtttagcggggcgggtcgccgtcatgcacctaagggttgccggtggggcaggggcgggcctgtttggcatgattcaatggcaggcggacggcttcaccgagccgcctgcgtcgctgagcgagcagagcggcgggactcagtccaccgggtaatccgcgatcaccacatccttgccctctgtggtcaggccgatcacctgataggcctgggcgcgctggccgtaatccatgccgggtgagccggccggcatgccgggtgccgctacgccgagcaagtcctggcgacgctgcagctcctggatttgtgccaccggcacgtgaccttcgacgaacttgccgtcgatcacaccggtgtggcacgaccccagccgcggcaccacacccagtttctgcttgaccgcgctcatgttgacctcgacgtgatcgcgcacctcgaagccgttggcctgcaggtacttgatccagtctttacaacagccacagttggcgtcgcgatgaacgtcaatgacctgagcggcctggacgctagcggccatgaacagcgcggcgatgacagcaagtttttttgatcgggtgatggccatgaaacactcccgttttaatggaaatcagcgacagccgcagccactgccgcaacccctggcgggcgctgcggcggggctcgcctggctgacgagttgcgccgggtagccggcgtcgttcaatgcggcgagcagcgcggtgctgtcggcgccgccttcgacgcgaacaaggccgctctggaggtcgacgtcgatcgcctcgacacccgcgattgcattcaatgcctgggtgacgtgccgaacgcaagcgccgcacgtcatgccctgtacctgaagcttgatggagctcatgagaagtcctccgcagtaaccggaccatccggctttggatggatcttcaaccttgcccatgtgtcaaggtcaagccaccttcgcatggcgtttgatatggcttcgacgatagcgcggcaaggctttcgacaagctgagcggaacattacttttctgtcagcttatggttcccgctgtaggttgtcggcacactctgggtaatgcctcgaagcagatctgaaaggatgaatcgatgaaactgctggtcgccgaagacgaaccgaaaaccggcacctatctgcagcaaggcctgagcgaggcgggtttttccgtcgaccgcgtcacccgtggcaccgatgcgctgcaacatgtcctgagcacgtcctacgacctgctgatcctggatgtgatgatgcccgggctggacggctgggaagtgctacgcatggtgcgtgcggcggggcaagacgtgccggtgctgtttctcaccgcgcgtgatcgcgtagaggaccgggtcaagggcctggagctgggagcagacgattacctggtcaaacccttcgctttttccgagttgctggcgcgggtgcgcacgctgctgcgccggggcagcgcagcggcattgcagacacagttgaaaatcgctgatctcgaagtggacttgctcaagcgtcgcgccatacgtgccggcagacgcatcgacctgaccgccaaagaattcgccctgctggaactgctgctgcggcggcgtggcgaggtgctgcccaagtcgctgatcgcctcgcaggtctgggacatgaatttcgacagcgacaccaacgtcatcgaggtggcgattcgaaggcttcgcgcaaagatcgatgatgacttcgaacccaagctgatccacaccgcgcgcggcatgggctacatgctcgatgagccggacgctccatgacgcgattgtctctcacagcccggctcagcctgatgttcatgctggcggtgaccggtgtgctggctgcggcgggctttttcttcatgcagttgagtcagcatcacttcgatcagcttgaccggcatgcgctggaagagaagctgcaggccagccgaaatctgttggaggggctcgacgacctgtccggcttcgacgccatgcgcccgcagctacaggccttgctgggcggccacagtgagctgacggcgcagatcttcgatgccgaggggcgcctgttgttcgccgatacgggccagggtcggctgactagccgtcacccctattcgactgtcgatggtgagctgcagcgcgatggacgtgtctggcagcgcaagaccggcgaggtggagattgccggacaacccctgaagatcgtgctcgcgctcgacgttaccgcccacaaggtgttctttcatacccttacgggctggctctgggctgggttggtgctctgtgcgctaatcagtggcgtgctcggttggttcctggcgcgcagtgggctgcgcccgctgcgcgaggtgacgcaggtagcggcgtcggtgtcggccaagtcgctgaccgagcgcattcccgccgagtcgacaccggccgagttgcagcaattggtgctggccttcaacgcgatgctggcgcggttggaggatgccttcgtgcggctgtcgaacttctccgcggacatcgcccatgagctgcgcacaccgctgtccaatctgatgacgcacaccgaggtggtgctgacgcgtgcgcgtagcagcgaggactatcaggagaacctctattccaatctggaagaactgcggcgcatggcgcgcatgatcgacgacatgctgtttctggccaaagccgacaacggcctgctcatcccgaacgcgcaacccattgcgctgaacgagctatgccgccaattgctggagttctatcaactgacggctgacgaacgcggcatccgcttcgagttgtccggccatggccagatcgaaggcgatccgctgatgctgcgccgggcattgtcgaatcttctgtccaacgcgctgcgctatacgccggacggcggggtcattcacctgggcatcgtgtccgatcaggctggggtagcgctcagcatcggcaatccgggcgcgaccatcgccgaagaacatctgccgcggctgttcgaccgcttctaccggatcgatccggcacggcgcgagggcaatccgagcaatgccgggctggggctggcgattacccgttcgatcgtcgaagcgcatcaaggcgagatccgttgcagcagccgcgacgggtggacgacgttcgatatcctgtttcaccggcgcgcctgattgccttctgcgtcgattctcctttgccgacacgcagaactggtcaatcacgaccgcgcatggttgcatcggggcggtgccgtcctgctcgacaacatgtccaaagatcgtgccgggcaaccttctaccgcggcgcaggaaggaatcatgaacatcgaacgatgcgaacaccttatcgactggaccagccagacccatacgcgcctgtccagctgcatgagcgaagcggcagaggaacgcagcgactcgttggccaggatgctgctggtctatctggcgcagcatgagcaggacctgacccgcaccatcgcccggatcaaggaacacgccgacccccgcgcgctccacacccggctgcacgatgcggttcagggcgacacgctggcgctggatttcgacagcgaggcctacgcacggatgagtgtcgatgagatctcgcgtgaaatcttcgccatccacaatcagatcatcgacctgtaccgctcgctcgagacgcgccccggcctcgaccgggcgcgcgagctgctgggggagatgctgcagctggaagagcacgaaaccatgcgtctggcgcagcaggtcaatcgcatgcatgagctctgagcgaccggctgtgggggcggtcgatcaggcaggcatcagaccacgtagcgcaggatcgccacgaagtgcagcaggctgccgaccatgacgaacagatgccagatgccgtgccagtggcggaagcgctcatcgtaggcgaagaagacgatgcctgcggtgtacgacacgccgccggcgaccagccaagcgaagccggcggtgccgagagcggcgagcagcggcttgaccgccaccagcacgatccagcccatgaccgcgtagatgacaatggacaggacccgtgcctccgagcgcggcttgatttcctgcaacatgccgatcaccgccagcgtccagacggtgccgaacagccaccagccccaggcgccacgcagagtgaccaggcagaagggggtatagctgccggcgatcagcaggtagatcgacaggtgatcgagcttctgcgtgatcgctttggcgcgtcctcggacgctgtgatagaccgtggaagtgctgtagagcagcactagggtgaacccgtaaatggccacgctgacaatcttggcgacatcgccatccatggcggccaacaccagtagccagaccgttccgatcagcgccagtgcgccgccggccaggtgcgtccaggcgttgaatttttctccgtgatacatcggtgttcagcctcgacccgctcccgcagtcaattgcccatcagcacgccgaagaccttcttcgccacgctggtggccgcctgcgccgggttctggcggatactggcttcctgctcggcgatgacggtgaacaagccatcgagggcctgttcggccacgtagccctcgaccgtgccgtacttggcatcgaccgcgccgaggccggaggcttttccggccagcgcattgtattgctgggcgacgccgaccttgtcggtggcctgcttgatgatgggcaggaacttggcgcggatctgctcgcggctggtcttgttcaggtactgggtcgccgagtcattgccgccggccaggattgccttggcatcggccacggtcatcttcttcaccgcgtccagcagcaacgcctgcgcctgcggaaccgcagcttcggctgccttgttcatgccgttttccagttcctcgacctgggcgcccatgcccatcatcttcagcatgcgcgaggccttgccgatgttgcccggcagctcgatgcgcacgtccgggtcgttactgaagccgcccggtcggccgagctgctgcacggcgactttcgctccctggctcagcgcgtctttcagcgccttgttggcatcgccctggctaagatcggacagcgaaagcgcccaggcgctggcggagagcatcagaccggtgagcaaagcagtggtgcgcagcatggggaatcctctgaagtggtgcagcaggcaggtgcagagcttaaaacgccagacacggcgtgccaaacgatggcggcagcttgtaccgaccgtttcgttggtgcaagcctgcgaaatcgacggacgagacgggtcgccgaccgtaccagacgatgccggcgcgtgttcgatcgcagccaggatggcatcatcaggcccgccgtcgacaatccgctcgagcgccagctcgatccgagaacatccgctacgcactgaccgacgagataacggcgacgaaaactttccgaggctagcggattcgaacaccaacatgtgcagaggggatgaacatgctgaaagcactcaaggcgctgttcgatagcagcggtgacgatcaccatacgccacacggcgttgaagtggccgcggcggcgctgctgatcgaactcggccgagcggattacgaaagcgaccctgatgagcgaaaagcaatcatcgacgccatccgccagggctcgggactgcaagacgacgaactcgactccctggttgaggctgcgcaggcgtccgccgagcgatcgacctcgctgtacgaattcacatcgctgatcaacgcgcagtattcgctggacgaaaaagtcgcgctgatcgaggcgctatggcgcgtcgccgtcgccgatggcgacatccacaaatacgaagagcatctgatccgtcgtatcgccgatctgctgtatgtgccgcattcggaattcatacgcgccaagctgcaggtactcggcatctgagttgccgctcggccttgatggaaactcagcgcacagtcggttcgcatcgcagccggcagcataaacgcgctcaggttggatcgtcaggcaacctcccagcgggtcagaactcgaaagcacccggatcgcactgccggtcgtcacgcgggctgccacgctggtcggtgtccgggcagagcacgccgcccatgtcgatggggtcgaagtaggggctgtcttcgagcagctcacgtagcgcgacggtgcgggtcgggccgccattgtcctgtagtgcgccgaggtacaggcgtactccggcttcgtccgcagccgtgggggtgaagccgcagccaccgaggaaatcgtaaagtccgcctcccgagccgccgatggcgttgaagctaccgctgatcagcgcgccactgcagaagggcatatcgttgaaggcgcgtatttcgaccaggctgttggccaggcggaactcgccggtaccggtatggctgaacagctgcgaatgattgctgaaggtcgcgttacggaccgataccttgccgtcgacgttgccgatttccgcggctcggacgccaccggtggtgctgcgattgtcgacgaaagtgctgttgagaatgtcgacggtgccctggtagttcagcagcccgccccagaagcgcgcgtcattggcggtgatcaggctgtcacgcacatacaactgcgccgccgggcccatgtttgaaatgccgccagcgtgtccggactcgtagccggtcgagttctgttcgatggtcgtgcgtgcgaccagcgcctgcccctcgttgaacagacccgcgccacggttgcacaggcgccggcttggaaaggccgcgcaggaggtttccagctcatgatcgatggtgttgccgcgcaacagcatccggtccatgcgcaggttgccgcgattccagatcgcgccgccgccgctgcccatgggccggccgttttccagccgcagatagctgagcgtcaccgcccgtggcgcggcggcatagatatcgaaaatccggtcgatggctccgccgtcgatgatcacctgaagatcggcgtttttcgcggcgcgtccgagccccgtcagggtcagcccgtcggtgatatccaggtcgccgatcgcatcgttcggcacgtccgcggtttcgctcccggtcagtgacaacacgtagtgccccgacggcacctctatcaggtcgtggccctggtgcgcgttgctctccatcaccgccgctctgagcgtgcatcgattggaaatggatcgacaggtgccatcgcccggccccacatccacctcgtcggccgtgctgtcgacacgcaacgtcaggccgatgggtgcggcgcaatcgcccggtagcgggtcgccggtgacgttcatgacgtagccggaggcttccggaaagcgcttttcatgaacggtgctcgaatagccggagccgagccagttacggcgctgataaccgacactgaagtgataggggatattggtttcgcagctgtccgcgaagtagcccaccgcgtgttgaccactcggcaacggcatcatggcccagggtgtgccaaggatgaccgcgttgacgtgcgcgatgcggttgccacgaccatcgacttgcgcacgcagcgggtagagcggaaccggcgaacgggcaacggaggagggcgtaaggttggtcaggctgggcgttgcgcaaccgcccagaccgacaatcagcgacaaggcgatcacacgggtgcgtgtcatacaggcccctttcggtagaagtccgcagaatttttgtcgggtcgcctgctgattatgggtgtcgtgcttgtcggcgaatgaacgtttcggcattaagcctaagcgccattagcgtggtttccaatgacggccttgcggtcggacgcccatgcttgagcgtcccgtcgccgtcccgatcagtcggttggctgttcctcgtcgtgtcgctccagcgccacctggcgaatcgataaacgaatctcggcgggcaatacgcgcttggcgacaccttcggccagctcaccgagcttatcgtggtagccgagcttgccagcatcgtcctggcgcagcacatcctgatcctgcaggcttttgatgaagtgtcggaacaggctcttgtcgaagaactcgggcgcgttcaggccgtgcaggatcgacagccgctgggccatgatcgtgcagagcgtctccagttcttcggcgtcgagcgtgttctggccgctgttgagcaacagcgaaatcgccatgtagaagcgttgcagggtctgcacgatgacccgtgccaacagcgtcagcagcacgaactggcgcgagctgggagccggccgcacataggtctcgccgtcgagcttgagcaggccttgctcgacgaaggcggcgagccaccgatcgatcacggcctccagttcctccggctcccagcgaatgaacagctcggcgcgcaagtacgggtacagcgcttcggtaaagcgcaggatctgttcacggctgatccgcgagctgctctggaagaagctcgccagcagcgccggcaacgcgaagatgtgcatcacgttgttgcgatagtaggtcatcaggacggcgttttgctcgtccaggtagaggatgttgcccagcgcatccttctgttcggcgagcaggccgagttccttcacgtagctgatcagcgcctcgccattgccgtccggcagcgtggtgtggggcgagtagggcacggcgcgcagcaggttctggtagaggtcgaggatgcgcgccagcgagcggcgatccagcgcctgacggctggtggaaagcatggccagggccaccaggttgaccgggttgaccgcggccgcctcgttgaggcgctgggcgatgcgctcggacagcttggtggtggtctcgttgagccagtcggggcggaagttcggtgccaggtcctgctggcgccagccaggctggtgttgctccagaaactcgttgagtttcagcggctcgccgaaattcacccagacctgcccgaagcgctgcttcagcgcaccgatgaccttgaagatgtcgaagatcgattccttcttcttcgccgcgccgcgcagctcgccgagataggtgcggccttccagcacccgctcgtaaccgatgtacaccggcacgaagagaatcggcaggcgcgaggaacgcagatagctgcgcagggtgatggcgagcatgccggtcttcggctgcaacatgcgcccggtgcgcgagcgcccgccctcgacgaagtactccaccggaaagccgcggctgaacagcgtgtgcaggtactcgttgaacaccgaggtatagagcgggttgcccttgaacgaacggcgcatgaagaaggcaccaccgcggcgcagcaggctaccgaccaccggcatgttgaggttgatacccgcggcgatgtgcggtggggtcaagccgttacggaacagcaggtaagacagcaacagatagtcgatatggctgcggtggcatggcacatagatgacttcgtagccatgcaccgcatcctgcaacggctccagatgattgacccggatgccgtcgtagatcttgttccagaaccaggacagcaccacctcgagaaagcgcacggccgtgtaggcatagtcggaggcgatttcgttgccgtagcgcagggcgcgagcttcggccttttcaagcgggatgttttcgcgctcggcttcgtccttgatcgcctgccgtacctgcggagcgtgcaccagacccttgaccaggttgcggcggtgcgacagatccggaccgatgacggcggtcttctggttgcggaaatgcacgcgcagcatgcgatgggccatgcgcagggtacgctcgtggcccttgttctgcgccaccagctcgttgagctggatcggcgtggagaactgcacacgggtcttgcggccgagcatgacgatgctcatcaacttgcgcagccgcccggtgacggcccaggtgtcggcgaacagcagtttccagggactggtctcgcgcgccgggttctggccccagaacacgctcaccggaatgatctgggcgttgtccacggcattgtgttccagcgcgccaaccaggcgaaccagcggctcgggggtgaccatccctgtgcgccggccgaaccagctggccgctggattaaggaaaatgaacgccgcgggctccacatgatcacccaccgccactgcagcgaccggccgcggcaggccggccttgctgcactcgtggtcgagtaccgccagatcgctcagcgaggcgcgctgcaagacatagaacactggcttgctgcgatccagtttgagcgtaaaggcggactggttgatggtctcggaacgtacccagacgtagagcacacggcgcagcagggaaaagatcagacggcgaacgggggagcgggtcatacggcagattcgactgtgaaagggttgataccctcgaagggcgcaagtgtgccgcatgcgggaggtgggcaaaagggcagagatgtgtgcgtcggcttacgaacgggggtggccctatcagccggacggcaatccacgtgcttcttcgagcggccgctataaggcgctctgtttgatggcgtcgagcggcagccatctctgcgaactgacgacctttgcatattccccgtccaggttagccagcgacatgtcgtgtaccgcttcggcgctgcgtaaccggccccggtagtcccgcttggcgaaggtgaaacaggcatcttcgactacgtaggtcttaaggcccctgcaacccgcggttcgcgccgtcgcctctaccgagttgttcgtcgcggcgccggtgatgacgatcgagccaacgcccagttgcgtcagaatcgcttcgaggtcggttccgctgaacgcgcaaggcgtagctttttcgatgactgtttcgttctggttgggctggaacgccggcttgaattcgaagccgtcctgaaaaggccagaacaccgactcgggctcggttgatcggtgtctgacgtggatcaccggcctttgctgcccacgccaatgcgtgagcagggcgagaatcgccgcctccgcgtgcgggttgtttcgctggcccagcttgggatgatcgatacctttctgctgatcgatcaccaggagcgccgcatcttccattttatttcgatccacctagatgaagcttgcacagctctgccgttgattgttcgcggtcgttatgagcggggcagggcgttgcgatgaatgtgttcgagccgctagtcgtccgaaaaaatttgctggaccatgttgtcgactaccaccgggctgtcgaaataggtgactgacggatcggtgccgtatttctcctgcacgaaggccctccagctgtcggtatacatggcctgcgcgtcggctcgcgaatcccacatgtagatgccgccgacggtgctcccgtcttcggaaatcacatagtgcttgcggatcagcccggtcacgccctggtaggtcggggcggtgctgaggaatatggcgcgcgcttcgtgccgcgtgatgggcttgggcaaccggaatgcggtgatggctatgatcattcggatctcctgcgcagggttcgaattcaccaggtgttgcgccggtagtgaccctccgtgcgtaacatctggccaatcgcggcgcgtctcgccgtgctcgggctgctcaaggatagtcgaggccgcgcgctttgcctgcgtgatcgccgcaggactgcccttgccggttgcaatgcgcgccgcgctctttttatagtccggcgcgcattgggcccgtctttgccgagttcggtcgtgggtccgtcatgggtgagaacgatgatcgaactgaagaatctgacgaaacgatttgcccagcacaccgcggtggatgcgttgtcattcactgtccagcccggcgaagtgctcggttttctgggtcccaatggggctggcaagtccaccaccatgaagatgctgaccggcttcctggcgccgacgtccggcacggcgagcatctttggctgcgacatccagacccgaacgctacaggcccagcgtcagatcggctacctgccggagggcgcgccctgttacggcgacatgacggtgcgcggctttctcgagttcatcgccgaggtgcgcggctatcgtggcgcggacaagcgcgtccgggtcgatacggcagcggggcaggtcgagttggagacagtgctggggcagagcatcgagaccctgtccaaaggcttcaagcgtcgcgtcggcctggcccaggcgatcctgcatgatccgcgcgtgttgatcctcgacgagcccacggacggtctggatccgaaccagaaacatcaggtgcgcgagctgatcagcgggctggcgcaggacaagatcgtcatcatctccacccatatcctcgaagaggtcaccgcggtctgtacccgtgcggtggtgatcgccggtggacggctggtggccgatgacacgcccttcgagctggagagccgttcgaagtatcaccaggccgtgaccttggtcagcgatgagccgttggacgacgttgcgctggcggcgttgccgggcgtggccggtatcgaattcaacgagcgtgagcatagcctcacgttgctggccaagcccggcgaagtgatcttcccgcaggtcaatgcattgataactcagcagggctgggcagtcagggagctggacgtggagcgtggccgcctggatgaagtgttccggaccttgacccgtggggaggcgctatgagccagttgccagtagtcttcaagcgcgagctgggcagctatttcgcgacgccgctcgcctatgtgttcatcctgatcttcctggtgctgtccggggtgttcactttctacctgggcggtttctacgagcgcggccaggcggacctcattccgttcttcagtttccatacctggctttacctgttcctgattccagccatcgccatgcgcctgtgggctgaggagcgcaagtcgggctccatcgaattattgatgaccttgcctatcacccgtttcgaggccgtcaccggcaagttcctggcggcctgggtgtttgccggcattgccttgctgctgacctttccgatgatcattaccgtcaattacctcggcgaacccgacaacggcgcgatcgttaccggctacttcggtagctggttgctggcgggcgccttcctggcgatcggctcgtgcatgtcggcgttggcgaagaaccaggtgatcgccttcattctggctgtcagcgtgtgtttcctctttatcgtcagcggcctgccgatggtgctcgatgcattcgcctgggcgccgcggtggctggtcgacgcggtcgcttcgctgagctttctgattcgcttcgacgccctcagcaagggcgtcatcgacctgcgcgacctgctgtatttcgtcacgctgatcatcgcctggctggccgccactgccgtggtggtcgatctgaagaaagcggcataaggaagtcccatgaaacgagtgatgtattcgggtgccgggttgctgctgatcgccttggctttcctgctgttcaatgccttctccggcctggtgttcacccacgcgcggctggatttgaccgagcagaagctctacaccatttccgaaggcaccaagaccatcctcgaggggctcgacaagcccatcgagctggatttcttctattcggacgaggcgaccaagggcctggtcgcgctgcgcaactatgcgcggcgcgtggaggaactgttgcgtgcctacgagcgcgagtccggcggcaagttgaaactgcatgtcgtcgacccggaacccttttccgaagaagaagatcgcgctgccgaactcgggctgcaggccgtgccgctgaaccagggaggcgacaaggtctatttcggactcgccgcgaccaacgccgaaggccgcacgcagagcatccccttcttcgcgctggatcaggaggaatttctcgagtacgaactcagccgcctggtacagagcctggcgtcgccgcagatgcccgtcgtcggtgtgctttcggatttgccgatcaccggtggattcgacatgcgtacccagcaggcgaccccgccctggacggtattggaacagattcgccagctgttccatatcgaaagcctggagcgcaacgtcgacatgattccggccaatgtgtcggtactcatgttggtgcatcccaaggcgctgccggagccgacgctctacgcgatcgaccagttcgtcatgcggggcggcaaactgctggtattcctcgatccgtacagcgaggccgacccgggtatggggttcatgccgggagaacctggcgatggcaagggctccaatctgacaccgctgttgaaggcctggggggtgcacatggcgcctgaccgagtggtgctggatgcggccaatgccatgtccgtcggcgtgggcgaggagcggcggccggtccggcatccgggctggctgagcctgccgcagcaaaccatggataccgacgacgtcaccaccgcttcgctggaaagcctgaccatggcgactgccggctttctcgaaccgctggaaaacgccacgacccgtttcactccgctggttcagagttccacgtacgccatgccgatcgaggcgcagcgttttgccacgctggaaaaccccgaggtgctgttgcgcgatcttgagcctaccggtgagcgctatacgcttgtggcgcgcatccagggcccggcgcgttccgcctatccggatggcatcgaaggccgcaaggacggcctgaaggatagcgccagcatcaacgtcatcgccgtggcggatacggatctgctggccgaccgcatgtgggtgcaggtacaggatttcttcggccagcgcatgccgcagccctgggccgacaatggcaccttcgtggtcaacgcgctggacaacctgtccggcaccgacgccttgatcagcgtccgctcacgaggccgcttcgcccggccgttcgtggtcgtcgaggagctgcagcggcaggccgagaaccacttccgcgagaaagaggaggcgctgcaacagcgtctggccgcgaccgaggcgcagcttgctgaattgcaggggccgaacgctgacggtgcgatagaactcaccgcagagcaacaggctgcgctgcagcgctacatgcaggaaaaactgcggattcgcaaagagctgcgcgaggtacgttaccagctcaacgccgatatcgatgcgctggggcgcctgctcaagttcttcaacattgccctggtgccgctggtattgaccttggtggtgttgctgacctgcttgtggcgtcggcgcaggacggcatgattaccgcgattctccgcggcaaggggagccgtactggatgggcggtggtggccggttcgcgaatcggccacggccgcgcggccaaataccggtgacgtggcggcgtgaaggtctaaaaaaacccggagacgggaaaaatccttgttctatactcgtccgtcgattgttctgaaacatccttgtcacgcctgcttggctatagtcactgccgttaggcggcctgcaagtgcttcaggccgatcgtccctccccaagcggggaataataagaatcgagttggagaagtaggatggctgagcgcgaaaccggaaccgtcaagtggttcaacgatgccaagggctatggattcatccagcgtggcagcggggcggatgtatttgttcactaccaggctattcgtggcgaaggccaccgctctctggctgaaggccagcaggtggagttttccgtgacccagggccagaaaggcctgcaggccgaggatgtggccgggctctgaccacccgaagcggagcatgagtcggtcgctgaccggctcgaaattgctgacaaagccccgacccaggtcggggcttttgtttttttgcggctgtcggcaggccgccagggggcgatggcgagccgtcataccctgcgcattttcatcgcgctaaaaacacgaaaccccgccacagggcagggtccgtcgtcgcttcgcaacgagttgtcgcggttgttacatgttggggtagttcggcccgccggtgccttccggcgctacccaggtgatgttctgagacgggtccttgatgtcgcaggtcttgcagtgcacacagttctgcgcattgatctggaagcgcttgctgccatcgtcattgtccacgacttcgtagacgccagccgggcagtaacgctgggcaggctcgtcgtacagcggcaggttgcgctcgatcggaatgctagggtcgatcagcttgaggtgaaccggctgctcttcttcgtggttggtgttggagaggaataccgagctgagcttgtcgaagctgagcttgccgtcaggcttggggtaatcgatcttcttcgattcggccgctgttttcaggcaggcgtaatccggtttggtgtcgtgcagcgtgaacggaatcttgccaccgaaaatgttctggtcgatgaagttgaaagcgccacccttgaccgcgccccacttgtggatcgccgcgccgaagttgcggctggcatacagctcctgatacagccagctggctttgaaaccttcctcgtagccggtcagctcgtcaccgccttcacgaccggcaaacagggcgtccgccaccgcttcggcggccagcatgccggacttcatcgcggtatggctgcccttgatcttggcgaagttcagcgtaccggcatcgcaaccgatcaatgcgccaccgttgaaaaccattttcggcagcgagttgatgccgcctttggcaatggcgcgcgcgccgtaggagacgcgcttgccgccttccaggtactgcttgatgaccggatgatgcttgtagcgctggaactcatcgaacggggagaggaacgggttgctataggacagatcgacgatcagaccgaccacgacctggttgttctccaggtgatagaggaacgaacctccggtattcgcatcgtccaacggccagccggccgtgtgcacgaccaggccttgctcgtgcttggcaggatcgatatcccagagctccttgatgccgatcccgtaatgctgcggatcgacattggcgttgagctggaaacggttgatcagttgcttgccgatatggccgcgacagccttcggcgaacagcgtgtacttggcccgcagctccatgcctggcgtgtacatgccttctttcggattaccttcgcggtcgacgccaaggtcgccggtgacgatgccgcgcaccacgccctgttcgtcgatcagcgcttcctgggcggcgaagcccgggtaaatctcgacaccgaggttctccgcctgctgggccagccagcggcacaggttgcccagggaaatgatgtagttgccttcgttatgcatggttttcgggaccagtgcattgggcagcttgcgcgcggcttcggcgctcttgagcaggtagatgtcgtctcgcttgaccggggtgttcagcggcgcctcgagctctttccagttggggaacagctcgtttagcgcgcgcggctcgaacacggcaccagataggatgtgggcgcctacttcggaacccttctcaacgacgcagacgctgatctcctttccggcatcggcggctcgttgcttcagtcggcaggcagcggacaggcccgcggggccggcgccgacgataactacgtcgaattccatgtattcgcgttccattggctatctcctactcaaggcttgattgttttatagatagtggagggctggatcgggtccctgatcaagccgagctggcgcattatatatagacgcccggatgggtccaatacaaacgtttgtttgaatttttcgtcagcctgttagaatccagaaactgtggcttatggcgggtcatatgcgttgttgaccccggcttacggctgcagtcaagatacgggcagttttgtgctcgccgaacaggtccaatggctgagttgacggcctggacctcgagcatggctcggttcgcctcggcgaaattctattcaccggagagtaacgaggaatccatgaagattcttgtagctgtcaaacgagtggtcgattacaacgtcaaggtccgcgtcaaggcggacaactccggcgtcgacctcgccaacgtcaagatgtcgatgaaccccttctgcgaaatcgccgtggaagaagccgtacgcctgaaagagaagggcgtggctagtgaaatcgtcgtggtttccatcggaccgaccgctgcgcaggagcagctgcgtaccgcactggcactgggtgccgatcgggcggtgctggtcgagtcgaccgaagagctcaactcgctggccgtggccaagctgctcaaagccgtcgtagacaaggagcagccgcagctggtcatcctcggcaagcaggccatcgacagcgacaacaaccagaccggccagatgctgggtgcgctgaccgggtttgcccagggcaccttcgcctcgaaagtcgaagtgtcgggtgacaaggtcagcgtcgagcgtgaaatcgacggcggcgcgcagaccgtttcgctgaaccttccggccatcgtcaccaccgacctgcgcctgaacgagccgcgctacgcctcgctgccgaacatcatgaaagccaagaagaagccgctggaagttctgactccggacgcgctgggtgtatccaccacctccaccgtcaaggtcctcaaggtcgaagcgccagctgcacgcagcgccggtatcaaggtcaagtccgtggaagaactggtcgagaaattgaagaacgaggcgaaggtaatctaaatgactatcctggttatcgctgaacacaacaatgccgtcctggctgccgccacgctcaacaccgtggccgccgcgaaagccatcggtggtgacatccatgtgctggtcgccggtagcgactgcgcagccatcggtgaagccgctgcgaaaatcgaaggcgtctccaaggtactggttgccgacaacgccgcctacgctcaccagctgcccgagaacgtcgcgccgctgatcgccgagctggccaagaattacagccacgtgctggccgcggctactaccaatggcaagaacttcctgccacgcgttgcggcgctgctggatgtcgatcagatttccgaaatcatcgccgttgaaagtgccgacaccttcaagcgtccgatctatgccggcaatgccatcgccaccgtgcaatccagcgcaccgatcaaggtcatcaccgttcgttcgaccggtttcgatccggtgaacgccgaaggcggctcggcgtctgtcgagcaggtatcgggcgctggcgacgctggcgtttccagcttcgtcggtgaagagctggccaagtccgatcgtcccgagctgaccgcggcgaagattgtcgtctccggcggccgtggcatgcagaacggcgacaacttcaagcacctgtactcgctggccgacaagctcggcgctgcggtcggcgcttcgcgcgccgcggtcgatgccggcttcgtgccgaacgacatgcaggttggccagaccggcaagatcgtcgcgccgcagctgtacatcgccgtcggcatctccggtgcgatccagcacctggccggcatgaaggactccaaggtgatcgttgcgatcaacaaggacgaagaggcgcctatcttccaggtcgccgactacggcctggtgggcgatctgttcgagatcctgccggagctcgagcgtctcgtctgaccgagccgctgccaaacaaacccgctctcgtagcgggttttttgtgggcgctcgcgtgcgactagcgatggtaagatcgccaggcgctcaccggcgccagtccgagtcccaatacagaggttttccatgcgctgtgccgtttcgctgacattcgccttgaccgccttgttgttggcgactcctttcgcggcgaacgcggcggcagccaagtgcgatcggctgatcgcaaccggtggcgcgaacaatccaccgtttctatggcgcgatccgcagaatcccaagcgtctggtcggcgcgaatgccgacctgctgaagcagatcaccgactcgctggggctgaaactggagctgctgtacaccggaaacgccgaaaaagccttggaagaagttcgcagcggtcgggtggacctgctggccgatgcggtgatcgatgtgcagcaactggcgtatctggatttcattcatcctccaattgctgagctgcaaacatcggcatgggtacgcaacgagccgggctttctctactccagtcgcgacgagctggcaggtcactcaggcacctacgtcgccacgacgcgcttcggtagcgagttccggacctacgccgacaagcacctgcgtctgcgtaccgctccaagcctggccgaggctgtgcaggggcttttggcgggcaagtccgactacgtgctgcatgaacgctacaacgtcatcgcgcaggccgggcggcagggctggctggacaaaatccagcgactggagccgccggtgagccggcgtggcatgcatttcgcggtggcgcacgactctgcgtgcaacggaccctggttgcgcggacagctggcgataaaaatgacagaattgcgtgccgccggcgtgccgcaacagctgctggtagacaatctcgaacgctggaagcagcaaccggcatcgacaagcaactcgcaacgctaggacctctcccttgaacaaacacctttcctgcatgctcgggctattggcgttggccggttgtgtcagcgatcccgcaccgactgaacagttgcgtctcaccgagcaggcgctgacgctggcgcgctcggcaggcgcctcggagcagacaccggagctggtgctggcagaagacgagtacgcggctgcgatggcggcgatgcgggacgaagacttccgaaaggcacggcggcttgccgaaagggcggagctggacgcccggctggcggaggccagcgtaattaacgataagcgtgatcaggagctggccgagttgcagcgacgcatcgcgcggctacgtgaacagttgggagatctgcggtgagagcggtgctttctattcccgtgttgctggtagcgctggttgggctccagggttgtgcttcgcaggcgtcccgccagcaactggaacaggcgaccttggcgttccagagtgtcggtgacgatccgcagacgcttcacgatgcaccgaaagatgtgatgcgagctgccgaatcgctggagcgggccaatcgctttgccgactactggggcggcgacgcggacgtcgagcactatgcctatctgagccagcgttacagcgagatcgcccgccagcacagcgagcagattcagaagcagcggcgtgccacccaactggcgatggagcgggagcgcttgcgtcaggcgctacaggaggcgcgcttgctcgatgcccagcagcaaggtcgcttgctggaagatcagatggtcagtctggcagcggctgaaaccgatcgtggcctggtgatgacgttgggcgatgtactgttcgaggctgccagcgccgaactcggcccttcagccaaccgcacgctgctcaaggtcgtgcgtttcctgcagctcaatcccaagcgcagggtgaggatcgagggctacaccgacaatcgaggcgacgcggccgagaacctggctctgtccaaggctcgggcgcaggcggtgagcgatttcatgcaaagcctggggctcgacggcgcacgcatggaggtggtgggttatggcgagcagcaccgcgtcgccgagaacgcctcggcgcgtgggcgggcgcagaatcggcgggtcgagatactgttttccgatgagcaggggcatctcagcagcccgcgttaaattcgtgtgccgccgcgctgaccaaaggtaaccgactgtgtcggcgagttagccgttaactgtattggtcgagcataacagtgttgtactactgttatggttcagttggcggggacggacgatatgaccaatctgttgctttatcagcgcatcgcgcatcagctcgccgaagacatccggcgaggggtttatcgcccgggcgagcgtgtgccttcggtgcgcaagatgagcatgcagctcaacgtcagccatgcgaccgtgctgcaggcttacgccaaccttgaagaccaggggatgatccgggcgcgtccgcagtccggcttctatgttcatcacacgccggcactgaccgcgccgacccctgatatcgcccaggtcgagcggccgacgctggtcacgcgcagcagcatcatcaaccaggtgctgagcgagtcacgccgcgatgggctgattccgttgggcgccgccgtgccccatgtggattacctgccggcgcgtgcgctgcatcagcagctggccaaggtgacccgcttccagagccagcgtgcgttcagctacatgttcagccccggttacgagccgctgcgccggcaggtcgcgatccgcatgcgcgacgccggcgtggtcgtcggaccggacgaagtggtgatcactcatggttgcgtcgatgcgctgcagatgtctctgcgggttttgaccaagcccggcgacctgatcgcggcggaatcgcccagctactacggcctgttgcaactggccgatctgcttgggctcaaggtcatcgaaattccctgcgatccggataccgggctcagcctcgaagcgctgcagctggcggccagtcagtggccgatcaaggcgctggtactgacggcgcgcctgagcaatccgcttggcggcagcgtccccgacgcgcggcagaagcagttgctgaagttggcggcgaatttcgacatccagattgtcgaagacgatatctatggtgagttgttgttcgatgtgggttccatcagggcgctcaagtccaacgatgcggacggacgagtgatctactgttcgagcttctcaaagacgatttcgcctggggtacgcattggctggatcattcccgggcgctaccgtgacgaaattcagcgcttgcagacgttcagcacgcattcggcgtgcagcgtgacgcagatgggtgttgcggcgtatctggagaacggcggctatgatcgccacctgcgttacatccgccacgaataccggaagaacctcagtgccttccagttggccgtgcaacgttatttcccggagggcacgcagatgacgcgacccaccggtggcttcattctctgggtcagtctgcctgctcgggtgaataccaaggagctgcacgttcaggcgctaaagcgcggcatcagcattgcgccgggcttgatcttcagtaacaccgagcagttcaatcattgcgtgcggctcaattgcgggttgccttggacggcagaggctgagcgagcgctgaagacactgggcgagctggcgggggaactttgtcggcagtcgaactgacaggatcgaaggaggcgttggccatgaaatgcttgagtttgctgcttgcgcttcccttgttggtcgcctgtgacggggacaagctgccaccacagccagggccgccggccaaacccaaggtcgaaaccacagccactgacgtcaagcctctgagcaccctcgagcctgcggctgccgagcacgccaaccgcgatgcccgcaagcccccggccatcgagatcgagctcgatccggtcgtcgatgaggaatccgagcggctgccgtcggagcaggtcgctcccgcgccgcccaagccggtggcggcggcaccggcgagcccgaagaagaaggtcgcgcccgaacgtgtcgagttgcccgaggccgagcttgacctcagtcttccggaggactgggccgaggaactcgaaccggggcacggggaagataccgcctcgatgcagttgttgccgccgttgttcgaatcgcgggaagccaacaactcggtgcagatgagcggacgtcttctacaaggcttgcaggaggatgatccgctgatcgatggggccgaaatcaatttcgagctgaaacgctgagccggttcggcgcgctagcgcaccgggttgctgctcgggatcgcttcgttttcgacgctcgccagcaaagcccgcaaggcctccgccggaagtgggtagctcatgtgaaagccctgcatttcgctgcagccgtcggcaaccaggcgcatcaactgttccgaggtctccacgccctcggccgtgacgcgcatatccaggccgcgaccgaggtcgatgagtgccttgacgatggaatgatcttcgctcgagtgcgtcatgcccacgacaaagctgccgtcgatcttgatcgtgtcgaacgggtaatggcgcaggttgttcagcgaggagtagccggtgccgaagtcatccatcgccaggcgtacgccgatgctcttcaattcgttgagcacgtccagggtgcggcggttctcctggagcagcgccgtttcggtgatttccagctcaagacggtgggccggcagcccgctttctcgcagtacgctctgaaccagatcggggagcacatcgttgcgtagctgcaagggcgacaggttgaccgagatcatcaggtcttcggcccagccgctagcctcggcgcatgcctgacgcagcacccattcgccgagcggaacgatcaagccggtttcttcggccagcggaatgaagtgctcaggttgcagcaggccgcggctcgggtggcgccagcgcagcagcgcttcggcaccattgatgcgcatgccttcgctgaagtagcgcggctggtaatagaccacgaactgaccatcgcctatggcctcgcgcagctcgtcctcctggcggcgccgctcgagcagccgctggtccatatcgctgccgtagaaccgccaggtaccacgaccatcggatttggcttgatacagcgcgatgtcggcgcagcgcaacagttcgctggccaggttcgtgtcggtcggcgccatggcgatgccaatactggcgccgatatgaatctgtttaccttcatagacgaaaggctcgctgatggcctcgacgatacgggcgcagagcctctgaacatcctcgttgtgttgcaggcggctcatgaccaggacgaattcgtcaccgcccagccgtgccaccaggtcgtcgccccgggtgcattgcttgaggcgattggatactccgaccaacacttcatctcccgcaccatggcccagcgtgtcgttgaccggcttgaaacggtccaggtcgatgtacagcacggccagtctggatccgctggtgagcgtggacagtttgctgtccagatagtcgcgcaggcggttgcgattcggcaggccggtcagggcgtcatgctgcgacagatactgcacccgcgcctgggctcgggtctcctcggtgatatcgcttgccgtgcccctgtatcccagcagcgtgtcgtcccggtagatcgcccgcgcggacaaccggcagtttcgctcgcagccgttggccgcctgatagctgcagcgcagcggtgcgcggtgtggcgcggccagccagtcctgcagcgctgcctgatcgctgatcagcagatcgatcaaagggtggccaatccaggcggaaggctgatgcccggtgatttcctcgaaccgattggagagataggttagacgcgcattctgatcggtctcccagatccagtccgatgcggcttccgccacgtcgcggaaacgctcttcgctggctgccagtgccttgcggctacgggatagccgctcgtagttggcgtccatgaacctgacggtcttgagcgcttgacgcagcagcagccaggccaggatgccaagccccagcgtgaccgcagccagcaccggcaaggtgatccaaagcaggtagtgccccggctgagacagatcccaggtaaacgcctggggcgtcccgtcgaccctctgcagggtgagcgatgcgtcatggccgcgggtcgtccgttcatcgacacgcaggccttcgaccgtatagtgctcgcccagctgaatcagctgttcggcatccagcacatcgacgaaaagcagggtcgaggcgggacggtccatcggctcgacatcactcccgcccggtgtcatcacggctgcggcaaccatcgccggatgcccgtccgccgttagcagaccgaccacggactcatcatcttcaacggcttcgcgggcttgcccgagcaacgtctccagaccgccaccgagccattggcgtgcgtcgacctcgaccagctcgccgtggatgaccgagtaggtcgtttcgccatcgctcgcgatgaccagcagcccctcatagccaaagtcgttatagagagacgggccgaggttttcctcgtcataggcccaggcggtattcacccgcttgctcagattggcataggcgtcgccccagaatgcgttgtcggtgacttggcgggccatgttgcgctggcgcgcctcgaaggccttgccgaccagagcggtttgctgcgtcagcgcatcgcggtcgatggtacgtgcgatatgaatgagcgccaccgcggcggcgatcagcgcagcagccagcacacaagcgataccgggcaggatacgcttcgagaatgtcgcttgggctttggggttgctgacttggatcgacgacggttccgacggcattgaggcttccttgaggaaggcagaatcatctcttgaatgaaggccaaaagccatctttgactgatgggtcagctattttcgcgggttatgcgggcccagggcccggtcgcgctacctgttgcgcgcgtcttcggcgtccgcttcggcgttgcgctgggcgatccgtcgtttctgctcgtcggtcagcgggattttccgggcatccgcgcgcaaggccatcagcccgccaacgatcatgccgaggaccaggaccagcagtaaccagatataccaaggcatgtcttttctcctgatggtttttgagcgtgcttcaccttacgccacgctggtcagccgcgccatggcgtgcccgaacggctcaacgaacgggcggcctcgatgagttttttctgcgacaatgcgcgccgaaattgcagaggaatgctcatgtcctgccagacccccatcatcgttgcgctcgattttccatcccgtgatgccgcgctggccttggccgctcagctcgacccggcgctatgccgcgtcaaggtcggcaaggaactgttcacccgctgcggtccgcaaattgtcgaagcgctgcagcttaaggggtttgaggtgtttctcgacctgaaattccatgacattcccaacaccacggcgatggcggtcagcgccgcagcggagttgggtgtctggatggtcaacgttcactgctccggcggccggcggatgatggccgcgtgtcgcgatgccctggataaggtgaacgggcccagaccgttgcttatcggcgtcacggtattgaccagcatggaacaggcggacctggccgacatcggcctcgatctggaaccacagcagcaggtgctgcgtctggcgggactggcggcggacgcaggcctcgacggtctggtctgctcggcgcaggaggcgcaagcgctgaaggcgcgtttcgcgcagttgagtctggtaaccccgggtattcgaccggccggtagccaggcggacgatcagcggcggattcttaccccggccgaagccatggccgcgggatcggattatctggtgattggccgcccgatcgcgcaggcagccgacccggctcgggcgttggctgcggtggtcggcgagctggcctaagccgtgtcgtgcggacggtcgtcgcgcctgcgacaaccgtctgcgctggcgacggaggtcagctgaccttcaacaccagcttgccgaaattgccgccggtgaacagcttcatcagcgtatccgggaaggtttccaggccttcgaccacgtcttccttgctcttcaactcgccgctctgcatccagccggccatgtctttcatggcttctggatagcgcgagacgtaatccatcaccaccatgccctgcatgcgcgcacggttgaccaacagcgacaggtagttggccggccccttgaccgcttccttgttgttgtactggctgatggcaccacagatgacgatgcgcgcgcctacgccgatgcgggtcagcaccgcatcgaggatgtcgccaccaacgttgtcgaaatagacatcgacgcccttggggcattcacgtttcaggcccgcggcgacgtcttcgctcttgtaatcgatggcggcatcgaagcccagttcttcgacgaggaagcggcacttgtcggctccgccggcgatgcccacgacgcgacagccttttattttcgcgatctgcccggcaacactgcccaccgcaccggccgcaccggagatcaccacggtttcgcccgccttgggttcacccaccgacagcaggccgaaataggccgtcatgccggtcatgcccagcgcggacaggaagcgcggcagtggcgcctggttcgggtcgactttgtaaaaccctttcggctcgccgagaaaataatcctgaacaccgagcgcaccgttgacgtagtcgccttcggcgaatcccggatgctgggacgcgatgaccttgcccacgcccagcgcacgcatcacctcaccgataccgaccggcgggatgtaggacttggcgtcgttcatccagccacgcatggcggggtcgagcgacaggtactcgttcttgacgagaatctggttcgggccgagctcgcccagcggtttttcgacgaactcgaaggtgtcgcgggtcggagcgccgactgggcgcttggccagaaggaactggcggttggtcgtgtccatgaatacctctgaggtgggcaaaagcttggtgtagcccgtcgagctcggctctgcaagcatggcaggaaagctggaatgcactggcatccgcctgagtgatatcgccacatgtctgttaagtcgcatgggggatagcggtataaacatgaccgctgcgtggcttgtggtcacgttaggactcgcaagcttttcaatcgacaagggtattgaacatgagcatgtctttttccggtcaggtggcgttggtaacaggggcggcggccggcattggtcgcgcgacggcactggcgtttgcccggcaagggcttaaggtcgtggtggccgaccttgacgaaacgggcggcgccgcctgtgcccaggccattcacgacgccggtggcgaggcattgtttgttcgttgcgatgtcacccgcgacgcggacgtccaggcgatggtcgaacaagccgtggcacgcttcggccgcatcgactacgccttcaacaacgccgggatcgagatcgagcaggggcgcctggccgaaggcagcgaggctgagttcgacgccatcatgggcgtcaacgtgaaaggcgtctggctgtgcatgaagcatcagttgccagtgatgctggctcagggcggcggtgcgatcgtcaataccgcatcggttgccggcctgggtgcggcgccgaagatgagcatctactcggcatccaagcacgcggtggtcgggctgaccaagtccgcagcgatcgaatacgccaagaagaagattcgggtcaacgcggtctgtccggctgtgatcgataccgacatgttccgccgtgcctacgaagccgatccgcgcaaggccgacttcgccgcggccatgcacccggtcgggcgcatcggcacggtggaagagatcgccgccgcggtgctctatctctgtagcgacttcgccgcgttcaccacagggcatgcgctggcggtcgacggcggcgcaacggctatctaacgccgccggacccaaaagcgcttctacaagggctgggccgaacccgtgggagcggtctcgaccgcgaaagggggtggcaccgtagcgaaaagatcgcggtcaagaccgctcccaccagcgcggcgctgaaccctgtaggagcggtctcgaccgcgaacgggggcggcatcgtagtaaaagatcgcggtcaagaccgctcagacaagcgcggcgctgaaccctgtaggagcggtctcgaccgcgaaaggggcggcatcggagtaaaagatcgcggtcaagaccgctcctacaagcgcggcgctgaaccctgtgggagcggtctcgaccgcgaatggggcggcatcgtagtaaaagatcgcggtcaagaccgctcccaccagcgcggcgctgaaccctgtaggagcggtctcgaccgcgaaaggggcggcatcgtagtaaaaagatcgcggtcaagaccgctcccacacaccggcagctcagagtttattggccggcttgtccaatccaacctcagcgcctcaggcccgcttgttgagaatcaacaaggtaagtccgccggcaatcagcccccacaacgccgcaccgatgccgaacagcgtcagcccagacgccgtcaccataaaggtgatcagggcggcgtcgcgctcattgggctgctgcatggcctgggtcaggcccgaactgatcgagccgagcaaggccagggcggcgatggacaacaccagcgccgctggaaacgaggcgaacaacgcagcgagcgtggcgccgaatatgccggcgataccgtagaaaaccccgcaccagacggcggcagtgtaacgtcgggccgggtccgggtgtgcctccggtccgctgcagatggccatggtgatcgccgccaagtgaattccgtgggagccgaacggagccagcagcaccgaggcgattccggtaaccgaaatcaatggcgaggccggaacctgatagccctcggcgcgaagcacggccaggccgggcatgttctgcgacgccatggcgatcacgaacagcggaatgccgatgttgaagactgcagcgatcgacagcgacggcgtggtccagaccggcaccgctatctgcaggctcagctggcggaagtccagcagacccaaggccgccgacaacgcgcagccgaccagtagcgccgacagcaccgcataacggggggcgagccgtttggccagcagatagctgaagaacatcgccagtaccagtagcggctgaacctttacggcacgaaagatctcgctgccgatgttgaacagcacgcccgccagcaacgccgcggccagcgaggcgggcacctttcgcatcagccgctcgaagctgccggtcaggccgcagagcgcgatcaacagcgaggcgaagataaaggcgccgatcgcttcagcgtagggaacgccgggcaggctgctgatcagcagcgccgcaccgggggtcgaccaggcgatgaccaccggcgtgcggtagcgcatcgacagcccgatgctacagatcgccatgccgatggacagcgcccagatccaggaagaaatctgcgcgctgctgagcccggccgcttgcccagcctgaaacataagcaccagtgaactggtgtagccggtgagcatggcaatgaagccggcgacgatggtggatgccgaactgtcggcgaatgggcgggctaacgaacgggtggcggccggcatggggtgtcctgtgggttgtacgacagcctagcctagggggctcggccgggcgcgtcacggtacagtgggcgggaagatgagtgttacagcgggagtcggtaagctgcgatcgtcactccggtgccgcccccttcgcggtcgagaccgctcccacgggttcggcgtggcccatgtaggagcggtcttgaccgcgatcttttactgcggtgtcgcccccttcgcggtcgagaccgctcccacgggttcggcgtggctcttgtaggagcggtcttgaccgcgatcttttactgcggtgtcgcctccttcgcggtcgagaccgctcccacgggtcggcgtggctcttgtaggagcggtcttgaccgcgatcttttactgcggtgtcgcccccttcgcggtcgagaccgctcccacgggttcggcgtggctcttgtaggagcggtcttgaccgcgatcttttactgcggtgtcgcctccttcgcggtcgagaccgctcccacgggtcggcgtggctcttgtaggagcggtcttgaccgcgatcttttactgcggtgtcgcccccttcgcggtcgagaccgctcccacgggttcggcgtggcccttgtaggagcggtcttgaccgcgatcttttactgcggtgtcgcctccttcgcggtcgagaccgctcccacgggttcggcgtggcccttgtaggagcggtcttgaccgcgatctcctttactccgtggcgtcatcacagtccagcctccagcccgattccaacctcgccttcgaagctggcaccgatgttgctattactcctgtgcgcgctgcgaggcgtcaagaaaaccgcagctgttggaggaatgatgagtcagggtatcgaattcaatcgcttgatgctggaaatgcgggccatgcagaccgatgcaatgacgcgctccaagccggtgactgcagccccagaggttggcgcgccgagcttttccgacatgctcggccaggcggtcaacaaagtgaacgaaacccagcaggcttccaatcaaatcgccactgctttcgagatgggccagggtggcgtcgatctgaccgaagtgatgatcgcctcgcagaaggccagtatttctttccaggccatgacccaggtgcgtaacaagctggtccaggcgtatcaagacatcatgcagatgccggtttaaggcagggttgaataatggccgaagcgcttagcaaagtacccgtgccggtcgattcggatgcgccgaagaagccgctcctgggcctgtcgttcctggaaaacctctccgaaatgtcgatgctgcggcagatcggtctgctggtcgggctggctgcgagcgtggccattggctttgccgtggtgctctggtcgcagcagccggactatcgtccgctgcttggcagcctcgccgggatggatgccaaccaggtgatggagaccctcgccgccgcggacatttcctataccgtcgagcccaactccggcgccttgctggtcaaggccgacgatcttgcccgtgcccggctgaaactggccagcgccggtattgctccgaccgacagcaacatcggcttcgagattctcgacaaggatcagggcctcggcaccagccagttcatggaagcgacccgctatcgccgcggtctcgaaggtgagctgggtcgcaccatttccagcctgaacaacgtcaagggcgctcgcgtgcatctggcgattccgaaaagctcggtgttcgtacgtgacgagcgcaagcccagcgcgtcggtactggtagagctgtatccgggccgcagcctcgagccgagccaggtgatggcgatcatcaacctggtcgccaccagcgtgcccgagctgaccaagtcgcagatcaccgtggtcgaccagaaaggcaacttgctgtccgatcagcaggaactgaccgagctgagcatggccggcaagcagttcgactacagccggcgtatggaaagcctctacacccaacgcgtgcacaatattctgcagccggtgctgggcagcggtcgctacaaggcggaggtatcggccgacgtcgatttcagcgccgtggagtccacctcggaaaccttcaatcctgatcaaccggcgctacgcagcgagcagagtgtcagcgaacagcgccagagcagcctcgggccgcagggcgttccgggtgcgctgagcaaccagcctccgggcccggcaaccgcgccggaaaatgcaaaagccgggcaagccgctgctgctggtgccgtggcgccggggcaaccgctgctggacgccaacggtcagcaaatcatggatccggcgactggccagccgatgctggcgcctttcccggcggacaagcgcgagcaggcgactcgcaactacgaactggatcgttcgatcagccacaccaaacaacagctgggtcgcctgcgccgcctgtcggtggccgtggtgctcgacgatcaggtgacggtttcggcggatggccagaccacgcgagtaccgcgcagcgccgaagaattggcgcgcttcactcgcctggtgcaggacgctgtcggtttcgacgccagccgtggcgacagcgtcagcgtgatcaacgccccgttcgctaccgattcgctggacgatgcgttcgtcgatatcccgttctactcgcaaccctggttctgggatatcgtcaaacaggtactcggggtgctgttcattctggtcctggtgttcggtgtgctgcggcctgtactgaacaacctgaccaatgccggcaagggcaaggagctgcaaccggtcggtgatgccgagctgggcgacatggacggcggggatggtgggctggccagtgatcgggtcagcctgagcgggccgcagagcattctgctgccgagcccgactgagggatacgatgcgcaattgaatgccatcaagaatctggtagcagaagatccgggccgggtggctcaggtcgtcaaagattggatcaacgcagatgagtgatgctcgagttcccgccaacaagctgaacaaggtcgacaaggccgcgattctcttgctttcgctgggtgaggcagatgccgcgcaggtcctgcgtcatctgggacccaaggaggtccagaaggtcgggacggcgatggcgcagatgcgcaacgtgcagaagacccagatcgagcaggtgatgagcgagttcgtcgagacggttggcgaccagacaggccttggtgtgggctccgacggctatattcgcaagatgctcacccaggcattgggcgaagacaaggcgggcgggctgatcgatcgcatcctgctgggcggcaacaccagcgggctggatagcctcaagtggatggaaccgcgcgccgtggccgacgtgatccgttatgagcacccgcagatccaggcgatcgtggtcgcctatctcgatcccgaccaggcgggcgaagtgctgtcgcatttcgatcacaaggtgcggctcgatatcgtattgcgcgtatcgtcgctcaataccgtgcaaccggctgcgctcaaggagctgaacctgatcctggagaagcagttctccggcaacgccaataccacgcgcgcgacgctgggcggcgtcaaacgtgcggcggacatcatgaacttcctcgacagctcggtcgaaggccagctgatggacgccatccgcgatgtggacgaggacctgtcctcgcagatcgaggacctgatgttcgtcttcgacaacctggccgatgtcgacgatcggggcatccaggtgctgctgcgtgaagtatcctccgacgtcctggtgctggcgctcaagggcgccgatgaagccatcaaggaaaagatcttcaagaacatgtccaagcgtgccggcgagttgctgcgcgacgacctcgaagccaaggggccggtgcgggtcagcgaagtcgaaggcgcccagaaagaaatccttaccatcgcccgccgcatggccgaagccggagaaatcgtgctcggtggcaagggcggcgaagaaatggtctagcaaggcactgagagcgaatgtccaaggaaaacccaagcgatgtgatccgcgcgaaggacgtcaacgttttcgaccgctgggccttgccgagtttcgatccgcatggtgccgagctaccggcaccagaggctgcgcacgagcctgccgccgagcaggaactgtcgcgcagcgaggatgttccggttgaagaagtcaaaccgctgacgctcgacgagctcgaagcgattcgccaggaagcctataacgaaggtttcagcaccggtgagaaggacggctttcatgctggccagctcaaggcccgtcaggaagccgatgcgacgctggcacccaagcttgccagcctcgaaaagctgatgacgcagttgctcgaacccatcgccgatcaggatcgcaacatcgagcacgccatggtcaccttggtcggccagctggcgcgggaggtgatccagcgtgacctgttgatcgactccagccagattcgccaggtgctgcgcgacgcgctcaagttgcttcccatgggcgccagcaacgtgcgtatccatatcaatccgcaggatttcgagatggtcaaggcgctgcgtgagcggcacgaagaaacctggaaaatcatcgaggacagcgacctgatgccagggggctgtcggatcgagaccgagcaaagtcggattgacgcgagcgtcgagacacgtctgggccaggccatcagccagctgttcgagcagcagcgggagaatgccaccagcccgcccgaagccgatctgcacctggatctggacgaccccgatgcgccttgaccgaaccagtttcgccaaacgcttcgaagcctatggcgaggcgatcaagttacccagccaaccgatcctcgagggtcggttgttgcgtatggtcgggctgacactggaagccgaagggctgcgcgccgcggtcggcagccgttgcctggtgatcaacgaagacagttaccacccgacccaggtcgaagccgaggtcatgggcttcgccagcggcaagctctacctgatgccggtcggcagcctggctggtatcgccccgggggcgcgcgtcgtgccgctggccaataccggacgcctgcccatgggcacctcgatgctcggacgggtgctcgacggcgccggtcgtgcgctggatggcaagggcgggatgaaggccgaggactgggtgccgatggatggcccgctgatcaacccgctcaagcggcacccgatcagcgagccgctcgacgtcggcatccgcagcatcaacgggctgcttaccgtcggccgcggccagcgcctcggtctgttcgccggtaccggtgtcggtaagtcggtgttgctcggcatgatgacgcgcttcaccgaggccgacatcatcgtggtcgggctgatcggtgagcgggggcgcgaggtcaaggaattcatcgagaacatcctcaccgaagaaagcatcaaacgctcggtcgtggtcgcctcgccagccgatgatgcgccgctgatgcgcttgcgtgcggcaatgtattgcacccgcatcgccgagtatttccgcgacaagggcaagaacgtcctgctcttgatggattcgctgacccgcttcgcccaggcccagcgcgagatcgccctggctatcggcgagccgccagcgaccaagggctatccgccttcggtgtttgccaagctgccaagcctggtggagcgcgccggtaacgcggaggcgggtgggggatcgatcaccgcgttctatacggtgttgtccgagggggacgatcagcaggatccgatcgccgatgctgcgcgtggtgtgcttgacgggcacttcgtgctgtctcgccgcctggctgaggaggggcactatccggcgatcgacatcgaggcttccatcagccgggtcatgccacaggtggtcagtgccgaacatatgcgcaatgcccagcgcttcaaacagctctggtcgcgcttccagcaaagtcgcgatctgatcagcgtcggggcctatgtgcccggtggtgatccggagaccgacctggccatcgcccgtcaggcggagatggtgcgctacctgcgtcagagcctggacgaagctgagcatctgccacagagcgaggccttgctggccggtgtgttcaaccccaaggcggcgagctaacccttgccgagcagtcgcgctgcgcgtctggcgccggtgatcgagctggccgagcgtgccgaacgtgagtccgccaagctcttcggccagggtcaagcgcagctgtcccaggccgagggcaagcttggtgagctgcgccagtatttcgccgactaccagcagcaatggctgagccagggcagccagggggtgtctggtcaatggctgatgaactaccagcgtttcctttcccagctcgagtcggcgatcgcccagcagcaacgcagtgtcgattggcaccgcaacaatctcgataagctgcgcgagcaatggcaacagcggcgtgcgcggctcgatggtttgcgcaaactggtcgaacgctatctccaagaggcacgaacggctgccgacaagcgcgagcaaaagatcctcgatgaattttcccaacgcctggccggtcggcccaaacaggattgaagcttgctgagccgtgctttgggtgctaaatcttcattagctcgcttgctatggcgcggctgatcaccaaagcgcagaagccccgagctaggcgcctcgcgcgattcgccaaagtcccttcagccagtacggcaaccacgtcattcggtttggatcaggagtgctacatgaccatcagttcacagctatcggcagatggacaagagctgacgattaccatccaggggcgcttcgatttcaacacccatcaggcctttcgcgatgcgtaccaaggcgcaggctgcacgcctcggcgttacgtagttgacctcagcggggcgacctacctggacagctccgccctgggcatgttgctgttgctgcgtgatcacggaggcagcgacaaggccgacattcgcctgatcaattgcagtcccgacgtacgcaaggtgctttcgatctcgaatttcgaacaattgttcgcgatcgcctgatgcctggtcggctctccatactcatcgccgaggatggtgcggccgaccgcatgctgttggccgccatcgtcgggcggcaggggcatcgggtgaccactgcggccaacggtgccgaagcggtaagaaaattcgagctcgagcggccccaattggtgctgatggatgcgctgatgccggtcatggacggcttcgaggccgcgcggcgaatcaaggggctggctggcaacgagctggtgccgatcatctttctcacctcgctgaccgagaacgaggcgctggtacgctgccttgaggctggcggcgatgacttcatcgccaaaccatacaacccgatcattctcgaagcgaagattcaagccatgcaccgcttgcgccggttgcaggccacggttctggagcagcgcgatctgatcgcacgacgcaatctgcaattgctcgacgagcaacgcgcggccaagagtattttcgacaaggtggcacatgcgggctgcctggatgcgcccaacatccgctaccgccagtcgccccgggcgctattcaacggtgatctgctgctcgccgccgaggcgcctgccggtcgcatgttcgtgttgctgggcgatttcaccggtcatgggctccccgcggcgatcggcgcgatgccgctggccgagaccttctatggaatgaccgccaagggctatacgagcaacgagatcctgcgcgagatcaatgccaagctgaagttcatcctgccggtcgagatgttctgctgcgcggccttgctggatatcaatctcaggcagggtgtgttgcgggtatggaacggagggttgccggacggctatctgctcaagggcgcggccggtggccgagtggcgttgccttccaggcatttgccgctcgggatactcgaggcgtccgcattcgacgatggcttcgaaacctttccacttgccgttggcgatcggctgctgctcctgtcggacgggattctcgagagctccaacgccgatgacgaactgttcggcgagcgacggttgctggcgctgctggatgccaacgacgacccgtcgatgctgttcgacgaagtgcagcaggcgctactcgcgttcaacggtcaaatgcttgacgattcgagccttgtcgaagtgtccatggtcggggacacggcgttgggctggcattcacagccggacgtccgctcgcccggcacgggttcgcagcggccgagggactggtcggtcggtttcgatctgcgtccgagcagcctgcgtaccgccaatcccttgccgatgaccatgcagctactgctgcagatcgctcctctgcgtcaccgggccgggaccatttacgccgtattgaccgagctctacgccaatgccctcgagcacggcgtgctgttgctcgattcggcctggaaatgcgatgccgaaggcttctccctgtattaccaggaacgtcagcggcgactcgatgcgctcgacgaaggcttcgtttccatcgatctgagcgtcaagtcggaaggggaggcggggcatctgcgcatcggtgtgcgcgacagcggccccgggttcgacgtacagcgtacgctggacaagcagtactgcgccgaatgcctgggcgggcggggcctgcgcatgattcggcagatgagcgatcgcttctactggcagccggacggtaagcttctgaacgtggagttccattgggccggtcgtgcataatcggcccactttccagccaggagccgacccgtggtcgaccacctcgacaaccgcgtgctgatgacccttcaggacgtcatggagggcgaatacccggtactgctggatacctttctcacggattcggaggaacggctacgcctgttgcagaacggctgcatgcgcggtgacgcggaggacctgcgccaggctgcgcacagcttcaaaggcagttgcagcaacatgggcgctgcgttgctggcggaactttgtcgccagttggaggacgtcgcccggctggggcggctcgctgacgcccccgaactgatcgagcgtatcgagcgtgagttcgccatcgtccgtattctctgccgggcggaacgccagcgctacggcgggccgggctgatttctgactctacctgcatgtcacgacaggccagccggatggcgtttccgctcggatccgagccagatggcccgttgtttgcttgagcaagcacacgtcataaccctgagcggaaagatccatggccgtttcccccgatctattgcttaacatcaaggcgcctgccgctgccgccaagaccgccaacgcagccagcaagtctgcctctcagcccagcagggacgaggcttccagcttcgccaacgtttacgccaaggagcgtcaggccaaacccgccgagcgtcaggatggcgcggcaaagcccgccgctggcaagaagaccggcgaacaaccgagtcaggaaaccgccaaggccgacggcaacgaacagccaccggtggcggagaccggcaacgcgctgccaaccgaagccgagtcgaccgacgacgaagtgctgggcgacgagatcgagctcgacccgctgctgctgttcggcatgggcgggcaggcgccgaacgacgctcccttgccggaaacgtcgatgcctacaggcagcgatttcgtcgcaggcctggtccagctaccgacgagcgtttcggacggtgaagcagagccggcggcggccgggcagggctcggccgatagtcggctcacgactcagaacaacccattgtccgccctcgccggggtggaggagaccgccacggacgcccaggaagcgctaccagcggccttgctcgccggcgaagtgtcgaccaacgaatctgaggagccatccttggaggaagcgttcggtgagttgctcgacaagctggatgcgccgaaagagagccgcagcggtggccccgacgtgccggtcaaccggctgaatccgttggctgaggcgatcacccagcagcaacagacccagcaggtgcagcgaccggtcatggtgcccgggcaaccggtgcagatgcagcaatccggttggagcgaggcggtggtcgaccgggtgatgtggctgtccagccagaacctcaaatctgccgagatccagctcgatccggctgaactgggccgcatggaagtccgcatcgatatgcacaaggaccagacccaggtgaccttcgtcagcccccatgccggggtgcgtgacgcgctggaagggcagatgcagcgtctgcgtgacatgtttacccagcagggaatgagcatggacgtgaacgtctcggaccagtctcgcggctggcgaggcgagggcgggagcgagtcgcgtggcaggggcacggctggcgccctgggcgacggcgatgaagaggtcgtccaggggacaatggagatcgccagcagccgcgccaggggcgataggggcatggtggattactacgcctgacgctggcagctggcgatggttggactggcgaagaacctgcgagcatcttcggcctggcattcaacctgatattcgttttagcttttcatccagccggcagcctggctgggttcaacgcgtgaggccgagcgtagcgcggcggttatccatcaccgctgcctacgcccggcttttttatgcccgccccgagccgaaaggggcgcacaattggtccgccaatcgactcgcggcgcatggcagccgtttacggcgctactcgccctggctgatactttggcatagcagttgctcgtaacacattgaaacgggtgaaccaccggtgatgacggaaatttggcatggctaagaaacaaggacctcccgacgtagcgagtcccgcagctccgagcgagggaaagggcaagctcaagctgatcattctgatcgtgctcggcttgctgttggcggtcgggctgtcgatcggtggcaccttctatttcatgtcgcgaggcgaaaccaagccaccggccgatgaagcgggcgaagaccattcgacaccacagcgacaggtggcggtctacgaggtgctggcaccggcgttcatcgtcaactttgccaatgcgggcgggcgccaacgttatatgcaggtgagcgtggcccttatgtcgcgtgatcaggcggcgctcgatgcgctcaaggaacacatgccgctgctacgcaatcaattggttatgctgttttccagccaggagttcgcctcgctgatgacgccggtcgggcaagagatgcttcggcaaaaggcgaccgccagcgtccaggagctggcgcagaaggaaatcggcaagcctgcgatcgagcaggtgctgttcaccaacttcgtattgcaatagggggcgtgttagatggctgttcaagacctgctctcgcaagacgagatcgatgcgctcctgcacggggtcgacgacggtctggtcgataccgaaagcgatgccgagccgggcagcatcaaaagctacgacctgaccagccaggaccgcatcgtccgtgggcgcatgcccacgctggaaatggtcaatgaacgttttgcccgctacacccgcatcagcatgttcaacctgctgcgccgctcggccgatgtgtcggtgggcggagtacaggtgatgaagttcggcgaatatgtccattcgctgtacgtcccgaccagcctcaatctggtcaagatcaagccgctgcgcggcacctcgttgttcattctcgacgccaaactggtattcaagctggtcgacaacttcttcggtggcgacggccgtcatgccaagatcgagggacgcgagttcacgccgaccgagctgcgtgtcgtacggatggtgctggaccaggccttcgtcgatctgaaggaagcctggcatgcggtgctcgacgtcaatttcgagtacgtgcattcggaggtcaacccggcgctggccaatatcgtcagtcccagtgaagtggtggtggtgtcgaccttccacatcgagctggaaagcggtggcggcgacttccacgtcaccatgccgtactcaatgatcgaaccgatccgcgaaatgctcgacgccggcttccagtccgatgtcagcgatcaggacgagcgctggatcaatgcgcttcgtgaggacgtgctcgacgtcaaggtgccgctcagctcgacggtggtgcgccgccagctcaagctgcgcgacatcctgaacatgcagccaggcgacgttattccggtggaaatgccggaagacatgatcatgcgtgccaatggcatgccgaccttcaaggtcaagctgggcgcgcacaaaggcaacctggccctgcaggtgcttgaatcggtcatgcgacctcgttgattcagctctaacccattttcagccggtcgaggattagcgatggcagacgaacacgaacatacatccgcagaagaacaggcgctcgccgacgagtgggcatctgcgcttgccgaagcgggcgacgctaaccaggacgatatcgatgccctgctgaaccaggggccggcaacgaaaccagcgccgccgcgtgcgccgctggaggaattcggtagcgcgccgaaatcggcgggcgtaccagccgggctcgagggtccgaatcttgatgtgattctcgacatcccggtgtcgatctcgatggaggtcggcagcaccgagatcagcatccgcaacctgctgcagctcaaccagggctcggtggtcgagctcgaccgcctggcaggcgagcccctcgatgtgctggtcaatggcacgctgatcgctcacggcgaggtagtggtggtaaacgagaaattcggcattcgcctgactgacgtcatcagtccgagcgaacgcatcaagaagttgcgctgagatgcgagctctggtctttctcggcctgttgctggcgctgccggcgatggcagcggagcccgtcgcgagcatgagcagtgctggtatgggcgcgcagatgagcaagctgttgctcggcctgttgctggtgatcggcctgatattcctgctggcctggctattgcgtcgcgtgcagcaactcaatccgcgtggcaatcaggcgatcaagctgatttccagccatgcgctcggcccgcgcgagcgcctggtgctggtacaggtgggcagcgaacaggtgctacttggcctgagcgccggtcgcatcgcgccgctgcacgtgttgaaggagccggtgcacctgccggatgccgagccggccagcccggaatttgcccagcgcctgatggagttgcttggcaaggaccagaaggacaagccctgatgcttcgattgttgctggcggtagtgctggtgctggccgctccgtttgccgtgggtcaggacgccggctcgctgatcgcccagggcgataacccgttgtcgatcccggcgatcacgctgagcaccgacgcgcaggggcagcaggaatactcggtcagcctgcagatcctgctgatcatgacggcgctgagcttcattccggcgttcgtcatgctgatgacgagcttcacgcggatcatcatcgttttttccatcctgcgtcaggcgttgggcctgcagcagacgccctcgaaccagatcctggtcgggctgacgatattcctcacgctgttcatcatggccccggtgttcgagcggattaacaacgaggccttgcagccctacctgaacgagcaactgtcggcacccgatgcgatcgcccgggccgaggttccgctcaaaggcttcatgctggcgcagacgcgcgagagcgacctggagctgttcgtgcggctgtcgcggcgcaccgatatccagacgccggacgcggcgccgttgacgatcctggtgccggccttcgtcacctccgaactgaagacggctttccagatcggtttcatgatcttcatcccgttcctgatcatagacatggtggtcgccagcgtgctgatggccatgggcatgatgatgctctcgccgctgatcatttcgctgccgttcaagatcatgctgttcgtgctggtcgacggctgggggttgatcatcggtacgctcgccagcagtttcggcacgctgtagtcctgaggggagaacgcgcatgacgcccgaggttgccgttgatctgttccgcgaagcgctgtggatgaccgcgatgatcgtcggcgtgctggtggtgcctagcctgctggtcggcttggtggtcgccatgttccaggcggcgacgcaaatcaacgaacagaccctgagttttctgccgcgtctgctggtcatgttgatgacgctgatctgggctgggccatggctggtgcgtgagttgatggagtacacccagaacctgatccagaacatcccgttgatcatcggctgaacatgacgatcgcggcctgctgtcgggcgacacccagtgcttgagctcagcgatgcgcagatcggcgcatgggttgggcagttcctgctgccgctgttccgcatcgcagcgctgttgatgagtatgccgctgttcggtacccagctggtaccgatgcgtgtgcggctgtatctggccgtcgcgattgccgtggtggtcgtgccgggcctgcctccggtcccggtggtcgaggcgttgagtgcccaggcgctggtgctgatcgccgaacagatcctgatcggggtgatgctgggcttcgtgctgcaactgttctttcacgtgttcatcgtctccggccagatgctggcgatgcagatgggcctgggcttcgcctcgatggtcgacccggccaacggcgtctcggtgccggtgatcggccagttcttcaatatgctggtgatcctcctgttcctggccatgaacgggcatctggttgtgctggagatcctcacggagagcttcaccaccttgcccatcggtggctggctggtcggcaccaatcatttctgggaagtggccggcaagctgggctgggtgctgggcgccggtctgctgctggtgttgccggcaatcaccgcgttgctggtggtgaacctggccttcggcctgatgacgcgggcggcgccacaactgaatatcttctccatcggctttccgttgaccctggtgctcggtctgatcatcgtctggatcggcatggccgacatcctggcccagtaccagaccttcgtcagcgaggcgctggcaatgctgcgcgaattgatcgggctgcgctgatgcagtcgctctccatacggcgttcggaggccatgcatggctgaaagcgaaagcggtgccgacaaaagcgaggaacccacggagaaacgtctccgagaatctcgcgaaaaaggtcagttggcccgctcccgtgaactgaacacggtggcggtgacattgggcggtatcggcgggttgctggcttccggcggcagcctggccggcagcctgatgaccatcatgcagggtagcttcgacctgagccgcgagacgctgctggatgaaggggcgatggtccggctcctgatgagcagcggcatgatcgcactggaagccatcatgccgctgctgatcgtgttgttgctcgtctccatcatagggccgatctcgctgggtggctggctgttctcggccaaggcgatggcgcccaagttcagccggatgaatccggggcccggcctcaagcgaatgttctcgaccaaggcgctggttgagttgctcaaggcgctaggcaagttcctcgtcgtgctgctggtggccttggcggtgcttggcgcttacgaagacgacctgctgtcgatcgccaagcagcctctggatctggccatcatgcacagcgtcaacgtggtgggttggtgtgcgctgtggatggcctgcgggctgatcctgatcgcggcggtggacgtgccgttccagctctgggacaacaagcagaagctgatgatgaccaagcaggaagtccgcgacgaatacaaggacagcgagggcaagccggaggttaaatcgcggattcgtcagttgcagcgcgatgccgcccagcgccggatgatgcaggcggtaccggaggccgacgtggtcatcaccaacccgacccacttcgccgtcgcgctgaaatatgacggaagcaagggcggcgccccgatgctggtggccaagggaggcgacttcgttgcgctgaagattcgcgagatcgccaatgaacaccaggtgaccgtgctcgaatccccggcgctggcgcgggcggtgtattactccaccgaactggatcaggaaatcccggccgggttgtacctcgccgtggcgcaggtgctggcctatgtctatcagttgcgccaataccgatccggcaaaggcaaacgtcccgatccgctgggcaatctaccgattccgccggatctacggcgggatgagtagctgaaaagccgaaaaaagcgctgtaggctggaggctggagtcttgaagccgaagctttgagtgtaaggaggcgcgccccgcggcgaaaaagcaggcttgctggctgctgaaaggtcaaaagcttcgccccgggtcggggctcccacaaagacgcgatacctacaataggcgatacgtggggcttcactctgagatgggtcgaagcctgagcctgttggaggcgcgccccgcggcgaatgcggacttgctggccgctgaaagccaaaagcttcgccccgggtcgggcctcctacaaaaaagcagtgcgtcaggctttgctccatggtcgaagctgtttccagcctccagcctccagcctccagcctccagcctccagcctccagctgctcttattcgatcaccccgcaggccacccgcgcgccgccgccgcccaggggctgtggatggtcggaatgattgtcgccgcccttgtggaccatcaaggcaagccccttgatatcgccgaggctcttcaggcggggcgccaataccggttggttggctttgccttcgctgtcgaccatcagcgccgggaggtcgcccatgtgaccctcgccccagggctcgccatgtttaccggtgttcttcggatcccagtggccgcccgcggcgccggcggcgatggtttcgccatccttttgcgccggttcgcagctgcccttggcgtggatatggaaaccatgcgcgccggactccaggccggacaggtcggggcggaacaccagtccgtactggctgctctcgatcttgaccgtgccgacggactcgccgatgccttcggtcgttaccgccttgaccggcacgctgagggtttcggcttgcaggcccatggccgtgcaaccggcgagggctgcgatgatccactgtttcatggcaagactcctgtgaagtaaaaattcaatgccgcaagggcatcgcttcgatgtttcgccttccaagcgatgccacttgggtgagactgcgcggttcccggtcggttcgtgcagccgctctgcctccggcgttcggctgcgaggcgaccagtcgcgaagttggaccccttcttgctatagccccggcagggcgcgtttttgcgtcaattctttgttctgttctgtcggggtctccgtggatcgcacgcaactcatcaatattcgcaatggcctgacgggcgcaggtcgcggcaacctgggcgtgccgctgctgctgctggtgatgatgggcatgatgatgctgtcggtgccgccgttcctgctggacctgctgttcaccttcaacattgccttgtcgatcgtcgtgctgctggtcagcgtctatgcgctgcggccgctggatttcgccgtattcccgacgatcctgctggtggcgacgctgatgcggctggccctgaacgtcgcttcgacgcgcgtggtgctgattcacgggcacgacggcggatcggccgcgggccacgtgatcgaggcattcggcaacgtggtgatcggcggtaactacgtcgtcggtatcgtcgtgttcgcgatcctaatgatcatcaacttcgtcgtggtcaccaagggtgccgggcgaatctccgaagtcagcgcgcgcttcaccctggatgccatgcccggcaagcagatggccatcgacgccgacctcaacgccggccttatcgatcaggccgaagccaaggtgcggcgggtcgaagtggcttccgaggcggatttctacggctcgatggacggtgccagcaagttcgtgcgtggtgacgctatcgccggcctgctgatcctgttcatcaacctcatcggcggtgtcgccatcggcatggcccagcacggcatgagcttcagcgaggccggtcaggtctatgcgctgctgaccatcggtgacggcctggtggcgcagataccttcgctgctgctttcgacctccgcagccatcatggtgacccgtgtcaccagctccgaggacatgggccagcaggtcaaccggcagatgttcgcctcgcccaaggcgctggccgtgtccgccgccatcatgatcgccatgggcctggtgcccggcatgccccacatgtccttcctcgggctcggaggcattgccgctggcggcgcttactggatctggcaccggcaaaagcaggtcaagcagcaggccgagcaggaagtgcagaaacagcaggagacgctgccggccacccgcgccgcggaaaccaaggagctgggctgggatgacgtgacgcctgtggatatggtcggcctggaagtcggttatcgcctgattcccctggtcgatcgcaaccagggtggccagctgctggcgcggatcaagggcgtacgcaagaagctgtcgcaggaccttggctttctgatgccgtcggtgcatatccgcgacaacctcgatctgctgcccaacgcctatcgcttgacgctgatgggtgtgagcctggctgaggccgaggtgtatccggaccgtgagctggcgatcaatcccggtcaggtattcggcccgctcaacggcatcgccgccaaggatccggcgttcggtctggaggcggtatggatcgaagccagtcagcgcgatcaggcgcagtctctcggctataccgtggtcgatgccagcacggtggtcgccactcacctcaaccaggtactgcacaagcacgctcacgagttgctcggccacgaagaggtccagcagctgatgcaattgctcgccaagagttcgcccaagcttgccgaggaactggtgccggggatgatctcgctgtcgacgttgctcaaggtgctgcaggcgctgctgcaggagcaggtgccggtgcgtgacattcgcaccatcgccgaggcgatcgcgaacgtggcgaccaagagtcaagatcccgccgcgatggtcgccgctgtccgcgttgcgctgtcccgcgcaatcgtgcaaaacgttgtggggcttgagccgcagctgcctgtcatcacgctggagccaaggttggaacagatattgctcaacagtttgcagaaggcaggacaaggctcggaagatggcattctcctcgagccgggaatggccgaaaagttgcaacgttctctggtagaagcggcacagcgtcaagaaatgatgggtaagccggcgatattgctggtggcaggtccggtccgcgcgatgctttcgcgtttcgcccgactcgccgtaccgaacattcatgtcctggcctatcaggaaataccagacaacaagcaggtcaccatcgtctctacggtgggtcagaattaaccgagggttataggccatgcaggtcaaacgtttcttcgcagccgacatgcgtatcgccatgaagatgattcgtgacgagttgggcgctgatgccgtgatcacgggcaaccgccgcgttgccggcggcgttgaactgaccgctgtgctcgattacccgatggagccggtagcgcccaagcagccgaatgcggcgctggaagcggagctacgcaagactcaggcgcgtatcgccgacgcccatgccgagttgagcgcaccgtcgcgggctcagccgagcaaggatcgccaactgcttgacgagaagccggcggcaatcgcccagcccaagccggctgccgctccggtcgctgccgactcgcgagcgatggaagccatgcagtccgaactgcaggggctgcgtgagctgatcgaaatgcagctcggctcgatcgcctggggacacgagcagaaccgtcgtccgcagcaggccaatctctggcgccgcttgcagcgcatcggcctgccggccgagttgtcacgcactttgctggagaaggtcgctgccgtgtccgagccgcgccaggcctggcgcatgctgttggcgcacctggcacaagcgatcaaggtcaccaaagaggaaccgttggaagagggcggtatcatcgcgctggtcggcccggccggtgccggcaagaccacgaccctggccaagcttgctgcacgctacgtactcaagcacggcgcgcagagcatcgcattggcgagcatggacaactatcgtatcggcgctcaggagcaactgaacaccttgggacgtatccttaacgtgccggtcattcagatcgatcccagccagccgttgagcaagacgctcgcaccgatggcccgcaagcgcctgatcctcatcgatacggcgggcttgccggcaggtgatccgatgatgcgcgcgcagctcgaggcactggccgatcgcggtatccggtcgaagaactacctggtattgccggcgaccagccagagccaggtgctcaaggcgacctggcacaactaccggccttgcggactggcgggctgcattctgactaaactggacgaggccggaagcctgggagacgtgctgggcctgagcatcagccagcatttgccgatcgcctacctcgccgatgggccgcgtatcccggaggatctgcatctgccgcgcagccatcagttggtcagccgcgcggtaagcctgcaatcggaggacaatcccagcgaggaaaccatggctgacatgttctccggtctgtacaacggtgcttcacggcgggttggatgaacgctttgctccgtgcaatacacaaagatgacgcgttcgggctgaacgcatcgatggcccaagggctccagcaagaaataggtttgtgaaaatgggtatgcatcccgtacaggttattgcagtgaccggcggcaaaggcggcgttggcaagaccaacgtgtcggtcaatctatcgctggccctggccgaactcggtcgccgggtcgtattgctcgatgctgaccttggcttggccaacgtcgatgtactgctggggttgacggccaagcgtacgctggccgacgtcgtggcgggcgagtgcgacctgcgcgatgtgatgattcaggggccaggcggcattcgcgtggtacccgcggcgtcgggcacccagagcatggtgcagttgtctacccttcaacattcggggctgattcaggcgttcagcgatatcggcaacgatatcgacgtgctgatcatcgacaccgcagccggcatcggcgacggcgtggtcagcttcgtccgcgccgcgcaggaggtgcttctggtcgtgaccgacgagcctacttctatcaccgatgcctatgcattgatcaagctgctcaatcgcgactatggcatcagccgcttccgggtgctggccaacatggcgcatgcgccgcaggaaggtcgcaacctgttcgccaagttgtccaaggtgaccgagcgcttccttgacgtggcgttgcagtacgtcggcgcgatcccctacgacgaggcggtgcgcaaggcggtacagaaacagcgcgccgtctatgaggcctatccgcgagccaagtgctcgctggcgttcaaggccattgctcagaaagtcgatacctggccgctgccggctacgccgcgcggccatctagagttctttgtggagcgcctggtcaggcccgccgcagattccaacgaacgatagcggctggactcggtatgtataacagcaaagctcaggcaaaagactcgcaataccagctcatcgatcagtatgcgccgctggtcaagcgtatcgcttatcacctgctggcacgcttgcccgcgagcgtgcaggtcgacgacctcatgcaggccggcatgatcggtctgctcgaagcgtcaaaaaaatacgatgccggcaagggcgccagcttcgagacttacgcaggcatccgcattcgcggcgccatgctcgacgaggtccgcaagggcgattgggcgccgcgttccgtgcaccgcaactcgcgcatggtcagcgaggcgattcgggccatcgaggccagaaccggacgcgacgctaaagatcaggaagttgcggccgaacttaaattgagtctcgatgattactacggcattctgggcgacaccctgggcagccgtctgttcagcttcgatgatctgctgaccgaaggcgagcacggggagttcgaggaggatgccgccagtgcccacccggagccgtcccgcgatcttgaagacgagcgttttcaacaagcgttggccgaggcgatcagcagcctgcccgagcgtgagaagctggtgctttcgctgtattacgacgaagagttgaacttgaaggaaatcggccaagtgctgggggtcagcgaatcgcgggtgagccagctgcacagtcagtgcgcggcgcgtctgcgggctcgtctcggcgagtggcgtgcccgttagcgggcggttcgcaagcaatttcattttagaggccgcttacgagcttcattcatgaggcccgcaacagaccgtgagcaggttctgggatttacggaggtatacttggacaagaacatgaaaatcctcatcgtcgatgacttttcgaccatgagacggatcatcaagaacctcttgcgcgatctgggcttcaccaacaccgccgaagcggatgacggcaccaccgcgttgccgatgctgaaaagcggtagtttcgatttcctggtcaccgactggaacatgccgggcatgagcggtatcgatctgctgcgcgccgtgcgcgccgatgagcgcctcaagcatcttccggtattgatggtgaccgccgaagccaagcgcgaccagatcatcgaggctgcgcaggccggcgttaacggatacgtggtcaagccattcacggctcaagtgctcaaagagaagatcgaaaagatcttcgagcgcgtcaacggctgatgcagtaacgccgcgagggcactatgacgcaagcagaccaaagcctggcggagttcgaagcgactctgcgggctcatgcaccccaattgatcgaaagtctgcaacagggccgcttcgaagaagccacgcaactgttcaacgagctcaatcaggcgcgcaaccatggcctctatcaggaggtcggcaaactaacccgtgaactgcacaacgccatcgtcaagctggagatggacacctgcgccacgggcggcgatccgtcaccgatcaccgacgccaccgatcgtctctcttacgtcgtggaaatgaccgagaaagcggccaatcgcaccatggacctggtcgaggaatcggcgccgctggtgaactacgtcagctatgaagcccagagcctgactgccgactggcagcgcttcatgcgccgcgacatgaatgccgaacagttccgcgatctggtcaagcgtatcgatcagtttctccagcgcagcatgaacgatggcagccaactgtcgcagaacctcagcgagatcatgctcgcccaggatttccaggaccttaccggccaggtgatcaaaagagtgacccggctcattacagagctcgaaagtaacctgcttaatctggtgctgatggcaggccaggtcgaccgggtcgcggggattcagcacgaccgcgatgcgatgcgcgccgagcaggaaaagaaaaaacaggaaaaagcgccttccaacggtgaaggtccgcagatgcatgccgatatacgtgaggatgtcgtatccgggcaagacgatgtcgatgatctgctttcgagcctgggcttttaggggaaggtgaatatgagcttcgacgccgatgaagaaatcctccaggacttcctggttgaggccggcgagattctcgaactattgtccgagcaactggtggagctggaaagcagccccgacgatacagccttgctcaatgcgatttttcgcggtttccatacggtaaaaggtggcgcaggcttcctccagctgcacgagttggtggagtgctgccacatcgccgaaaatgtcttcgacatcctgcgcaagggtgagcgtcgcgtcgactcggaattgatggatgtcgtgctccaagcactggacgccgtcaatgaaatgttcgcccaggtgcgtgaacggaccgaagttacgcctgccacgcccgagctgctcgcggcgttggcgcgcctggccgagccggccggagcgccggaagcggtagtcgaagctgcacccgagcccgagcctgaagccgagacggcagatagcgaattcgaacagttcctcggtgcgctggatgaaaccgccgatggcgctggcgctggggcaacggacgagatcaccgacgaggaattcgagtcgctgctcgaccaactgcatggcaagggtcagttcgccgccgaatccggcgcgaagcccgtgccgccaactgccgtgtcaaccgaagcccctgccagcgatgaaattaccgacgacgagttcgaggcgctgctcgatcagctgcacggcaaggggcaattcgcagagccggtggctcctgcgcctgcggcttccgctgagcctgcgacgccatccgccgcggggggcggtgacgagatcaccgatgacgaattcgaagcactgctggatcagctgcatggcaagggcaagttcgagcccgagacagcggtttcggtagcggcagccgaaaaaccggcgcctgcgccgaagaagcctgcggcggcgaaaccggccgcaacaccatcgcccagcaagccagcagcgccggcaaaggtcgagccagcggccaaagccgcacccgccgcggaaaagcccgcgagcgaagccgagacgaccgtgcgtgtcgatacggcgcggctcgacgaaatcatgaacatggtcggcgagctggtgctggtgcgtaaccgcctggtgcgtctgggttcgaacagcggcgacgaagccatggccaaggccgtgtccaacctggatgtggtgacggccgatctgcagagcgcggtgatgaaaacgcgcatgcagccgatcaagaaggtgttcggccgtttcccgcgcctggtccgggatctggctcgcagcctgaaaaaagagatcaatctggagctggtcggggaagagaccgatctggacaagaacctcgtcgaggccctcgccgatccgttggtgcacctggtgcgcaacgcggtcgaccacggcatcgaaacgcctgaagagcgtgaggccgccggcaagccgcggatcggcaaggtggtcctttcggccgagcaggagggtgaccacatcctgctgatgatcaccgacgacggtaagggcatggacgcggagatcctgcgggccaaagcggtcgagaagggcctgctcgatcgcgacgccgcggaacgcttgagcgatctggagtcctacaacctgatcttcgccccgggcttttcgaccaagtcggaaatctccgacgtgtccggtcgtggcgttggcatggacgtggtcaagaccaagatttcccagctcaacggtacggtcaatgtgttctccaacaagggccagggctcgcgtgtcgtcatcaaggtgccgctgacgctggcgatcatgccgacgttgatggtcatgctgggtgaccaggcgttcgccttcccgctggtcagtgtcaacgagatcttccatctggacctgtcccgcaccaacgtggtcgacggtcaggaagtggtgatcgtgcgcgacaaggctctgccattgttctacctcaagcgctggttggtacgtggtgccgagcgggaggagcaacgcgaggggcatgtggtgattctgagcgtgggcaatcagagcattggctttgtcgtcgatcagctggttgggcaggaggaagtggtgatcaagccgctgggcaagatgctgcagggcactccgggcatgtccggtgcgacaatcaccggcgacggacgtatcgccttgatcctcgatgttccgagcatgctcaagcgttacgcgcgccggatctgatcacgaggcagcggctttcaaggaccgctgccgctaggagtgttttatggcagtcaaggtcctggtggtggacgattcgggcttcttccgccgccgtgtatcggagatcctctcttcggaccccaatatccaggtgatcggcaccgcgaccaacgggcgtgaagcgatagaccaggcgctggcgttgaaacccgacgtcatcaccatggattacgaaatgccgatgatggatggcatcaccgctgtgcggcagatcatgcagcgcagtccgactccggtattgatgttctcctcgctgactcacgagggcgcccgcgtcacgctcgatgcgctggatgccggtgctgtggacttcctgccgaagaatttcgaggacatctcgcgtaatccggacaaggtcaagcaactgctctgcgagaagattcacaccatctcacgcagcaaccgtcgtttcagcagtaccacggcctctgcggctagtgcattgactgcgcgtccgaccgtctccagcggagcggcgacggctgcgccgcggcccgccgcgcccgctcccagcgcggcagcgccgcggcgcaaggcctatcggctggtcgccatcggcacatccaccggtggcccggtggcgcttcagcgcgtgctgacccagctgcccgccagctttccggcgcctatcgtgctgattcagcacatgccggcagcgtttaccaaggcgttcgccgagcgcctggacaaactctgcaagattcgcgtgaaggaagccgaagacggcgacctgttgcgtcccggtctggcgctgttggcacccggtggcaagcagatgatggtcgacgggcgtggcgcggtgcgcatattgccgggtgacgagcggctgcattaccgcccctgcgtggacgtcacgttcggctcagccgccaaggcgttcaacgacaaggtactggcggtcgtactgaccggcatgggcgccgatggccgggagggcgcgcggatgctcaagcagagcggcagccaggtatgggcacaggacgaggccagctgtgtcatctatggcatgccgatggcggtggttaaagccaacctcagcgatgcggtgtatggactcgacgatatcggccgtcacctgagcgaggcctgcctctgatggacgtgctcagcctgatcgggctggtcctcgcgttcgttgccatcgtcggcggcaactttctcgagggcggtcacgtttcggcattactcaacggtccggcggccctgatcgtgctgggcggcaccctgggcgccgtcctgttgcagacgccgatgaccgtgttcatgcgcgccatggccattctcggctggatcttctttccgccacgtatcgacatggccggcggtatcagcctgatcaccggatggagcgctaccgcacgcaaagaggggttgctgggactcgagccgattgccgagaccgaagccgatccctacgcgcgcaagggcttgcagttgctggtcgatggcgccgagcccgaggttatccgcagcatcctcgaggtggacctgtacacccaggaaagccgcgatctccgcgcggcaaaggtgttcgagagcatgggtggctactcgccaacggtgggtatcatcggcgcggtgatgggattgatccacgtgatgggcaacctggccgatcccagccagctgggcaatggcatcgcggttgcattcgtcgccaccatctacggcgtcgccttcgccaacctgttggtgctgccggtgggtaacaagctcaagagtgtcgtgcagaagcacaccgcctaccgcgagatgctgctcgaaggcgtcctgtcgattgccgagggggaaaacccgcggtcgatcgaaatgaagctgcaaggcttcatggattgaatgatgcgaggctgacggcgcgtattcctgccgctgggcatatgggaaccaacatggcaaacgctcgaaacaacgccgcaatcggtcgccgctccgacacaggatccgcgctcgcgcccgcttgcctgtctgttgcgggagtcgcctgatcatggcgcggcgcaggctgcacgaggagccggagaatcatgagcgctggctggtttcctacgccgatttcatcacgttgctgtttgcgttcttcgtggtgatgtactcgatttcctcgctcaacgaaggcaaatacaagattctgtccgactcgctggtcggcgttttcaaccagccggatcgtgccgtcaagccgatcccgatcggtgaagagcagccgcggaccagccatcaggacctcagcgccagcgacacggcgcaagccggtgacgctccggtcgatcctctggatagcatcgtacgcagcatgcgcgcggcgtttgccgaccttatcgggtcgcatcagctcacggtgcgaggcaacgagcagtgggtcgagatcgaactcaactccagcttgctgttccccagtggcgatgcgctgccaaacgatatggcgttcggcatactcgacaaggttgccaatattctggcgcctttcgataaccctatccacgtggaaggctttaccgacaacctgcccatcagcaccgacaaatatccaaccaactgggagctttcggcggcgcgagccggcagcgtggttcggatgttggcggccggcggtgtgcaggcctcgcgcctggcggcggtcggctatggtgaattccagcccatcgccgataactcgacggcggaggggagggcgcgcaatcgccgagtcatcctggttatttcgcgaaatctcgatgtgcgccgcagcgtgaccggcgtcggcagtgccaatgctcgggttgccggagctgccggacaatctggcacacaacctgcaccagcttcggctcaataggggccgcgtgcggcgtcgtcaaatccccgtcgccggctagctcggcgcggcagttcccggtctggttcgatccggatggaagagagttatgagagtctgggcagtagccaatcagaaaggtggagtgggcaaaaccaccacgtccatcgcgctcgccggtttgctggccgattcgggcaagcgtgtcgtggcactcgatctggatccccacggttcgatgaccagctatttcggtcatgatccggataacctcgagcacagcgttttcgacctgttccagcatcaaggcgccgttccggaaggcctgccctggcagctgctgctgccgacgagcaatgaacgtatctccttgctgccctcgagcacggtgctggcgacgctggagcgtcagtcgcccgggcagaacggcctcggcctggtcattgccaaaagcctgtcgcagctctgggaagatttcgattacgccatcatcgatagcccgccgctgctcggcgtgctgatggtcaatgcgctggcggccagccagcagctggtgattccggttcaaaccgaattcctcgccatgaagggcctggaacggatggtcagcacactcgccatgatcaaccgctcacgcaagcaagccttgccgtacaccatcgtgccgaccatgttcgaccggcgcacccaggcatcgatgaacaccctgaaggtattgcgcaacaactacgaggccaatctctggcaggctttcattccaatcgatacccgcctgcgcgacgccagccgtgccggggtcacaccgtcgcagcatgaccccaacagccgcgcggtgctggcgtaccgcgcgctgctcaagaccttgctggccgcacaagcttcaccgcaggtggcctgaatgacgacgtacgggccccatctcggttcaagttcatcgtggctgtggccgatagcctatccagttggttcgcacgagttggtttcatgagccgtacccttcttaaagaaagccgttcgcaacagacgctgcagtcctatctcgacgcgctcctgcaggacgcggtgatggagctgaccgagtcggtcagtcacgacgagtttcaggctgccgtgctcgaagagcagcaacgcgacgtccagcgggtgctcgcactgcgatcgacggcgccacgcacgccggagccgaagccggtggtagagcccgtggcgttgcagagcgagcctgaggcgctgctggtgttgcaacccgaaacagagccagagcaaccactggcaccgatcgagccgatcgccagtttcgagccgcaggcccaacagcctggcggaccgccggcgcaccagagcggccaaccggagtggggcgaggaacccttcgaatgcctgcttttcgatgtggccggcctgaccctggcagtcccgctggtgagcctcggttcgatctatccgctggaaggccacgacctgacgccgctgtttggacagcccgcctggtttctgggcattctgccgagccaggctggcaacctgaaggtgctggatacggctcgctgggtgatggctgagcgatatcgcgacgacttccgcgaggggttgcagtatgtgatttccgtgcagggctacgactgggggctggcagtccatcaggtgagtcgctcgattcgcctcgatccgaaggaagtcaaatggcgcacgcagcgcagtcagcggccctggctggccgggacggtgatcgagcatatgtgcgcgctgatggacgtgacggcccttgcagagctgatcgccagtggtgcgacgcgccatctcaagggcgtcccgtcgtaaacgaaccgaacaatcaatggggcgcgcaggcaccccgagtaaccgatagaatcgaccgccattgcggtacatgaagaggtggggctatgaagatgacttccgcgcagggttccgatgatccggttctgcaatgggtgacctttcgtctggacaacgagacctacggcatcaacgtgatgcaggtccaggaagtgttgcgctataccgaaattgcgccggtgccaggcgcgcctagctatgtgctgggcatcatcaacctgcgcggcaatgtggtcaccgtgatcgatacccgccagcgcttcggactcgagacggcagcggtgtctgacaatacccgcatcgtcatcatcgaggcggaccgtcaggtggttggcattctggtcgacagcgttgccgaggtggtttacctgcgccagtccgagatcgaaaccgcgcccaacgtcggtaacgacgagtcggcgaagttcatccagggcgtatgcaacaagaacaacgagctgctgattctggtcgagctggacaagatgatgagcgaagaagaatgggcggaacttgagagcatctgatagatgatcgcatcgctggtggcggcagttgtcgcgcttgccctttgctgcctggctctgctgggcggctgcatctggttgttccgccgccagcgggacatggcgcgggcccaggcgctcgagaatgcggcgcgtgaccagcggatcaaggagcttggcgcgcggctcgacaattatcagcaaagcagcatcaacatgggcaagacactgcgcgagctgtcgcgcaccgttgctccgttgccggagaagctcagtcagctcgagcagcgcgatcccaataactacaccttctcccaggccgccaaactggtcggcatgggcgctagcgctgacgatctcgcgcagttctgtggtttgtcccagtcggaagcggaactgatgcgcaagctgcatcagacgcggcgtaacacggactgacccgcctcccggccatcgttccgctggccgacggactcccgccggtcatgccggaacactgaacgatatgggtattgcttcctccaatctggacaaggcttcgccgtgtccggcgcaggcccatgcccggatgggaggaggatgtgatgctacgcattctgatggcgtgcctgctggtgagcccagtctgggtcaatgcggccgaagcgccactcgagatcgacggcgcaatgaccatcaacgtgtaccaggccaggcaactccatgagctcggcgcggtgttcatcgacgtgcggccgagccgcgaatggagctgggggcacgtcgatggcgcggtacacatggacctggcgcgtgggttcttcgggttatcgcaggccgactggccgagaagcgtgccgctggtggtctactgcgacagcgaggtctgtcctgccagtgccgaggcggttcgtctcgccgtcgcgtggggttacgagcaggtgttctacttccgtcaggggtatttcgcctgggtattggcagattttccccagcagaaaggccactccagcggcatcaccacgctcaacgcacaggcccattgagccgcgggatgagcggtgtgtccgcttgcccggtgaagcctgcggggcatttgcctttgaggtaccaggcgaaggcgatgatctccgcgattgtgcgatacagcgcctcggggatggcgtcgcccaattccaggcgcgccagcaacttcaccagttcggcattctcgtagatcggcacctcgtgctcgcgggcgatcgccagtatcgcttcggcgagttcatcgtcgcccttggccgatagcgtcggggcattggcgccgtcgtaggacagcgcgatggcctggcgcggtgtgtcgaatgtcatgcggtttcatccacgaagcgttggtcgagggtggtgcgcggtccctgtggcggcatgccctgcctgcaggccagttcgccgacgttcaatcccgcggtgagcagccgctggcgcaaatgttcgagttccgtcgaaatcagctcggccgtcgcgctgcgttcggcccatatctggctcgacaggctgccctggaaaagttgtgcttgtacctgcaaggggcccaggggcgtgacatcgaaggccagttcgactctccagagcgtgtctggcttgtcttttggggactgcggcggcggttcttcgcgctgaaacttgacctgcagcgggacgatgtctcgctggtcacgcatcggtatctcgatctgccacgtcgtgacctggacgccctcgggattggtctgggtctgagccaggctggacaactgatgggtctggagccgagatatcgccgcggcggcaagcttcaggatcagttccaggtcggcttcttcctcggcgttcggcaacgaccgactcggcaacgggaagctttgcgccaggtggcgtgcgttcgactgcccaagggctcccagcgcgttgcgtgcaaacgcaggcagtgcctgccccagtgcggcgccggcctgtgcggcggtgagtggtccgcttgtcggcagccctggtagctgagcgatcaggcggagcagggaggctttcatatcggccggcaacgcatcggcctggccgcttagcaaaccggcttcgagaaacaccccgctgcgtgccaacgcctgggctagcgtcttggtatcggtgagcgcctgcatgctcggcaccagaccgagcagacgctcggccgcgccgcgtagcgagtcgggcaatgcggcaccggttccgagcgcgttgagcaatccctcgatcgaaccttgccggccgtgctgctcggtcagttgctggcccagcaccaattgatcgaggcggccgctcaggggcatgaaggacaacgcctggtcgccctggacacgtgcggtaatcagactgcctggtgcaaggggcagggcggactcgacgttcagcttctgccctgcaaggggcgaattgagcaggctgatgacgaccttgaaaaggggctttccgtcctgctgtgtttgctggctggccgtcacttttccttgtatcacggtgcctatcggaagctgggcgagatcaatgctgctttgcggctggcgactgccgggttgcaacgcggcgatcaggcgcatgtcggaaacggcggtaaccagcatggcggtgcccggggtggtcgctttagggctgctggtctcgacggttgcctggcgcccgttgttcatggtcaggcgcagcgtcagctggaatgtttgcagcgcttccttgatgctgaccacctcggcgtcggcactttccccggccgcgagcaggccctgcatcggctgcagcagtttcaacaccatctcggtcgaggtcgtcgcgggacggggcgggcccgagggggcgattgcctgggtgctcttgatctcggtcattattacttaaatgctcttacaacctttcgccgttgtggccttcggtgcgcgggctcggcatgtataattccggccgcccggcctgccatcggtatagcggctgggctctctccatcttgaggtagccctagcgtgtccagtccctttctagaagctgtggcgctgtcctgcgagcgggactggcgtctcctgttcgagaggttagacctgcggatagccgaaggggaaatgttgcagatcgccggccccaacggcagcggcaagaccagcctgctgcggctgctgtccggtctgatgcagccgaccgccggcgaggtgcttctcaagggccgggcgctggaaagccagcgcggcgaactggcgcgcaacctgttgtggatcggccatgcggcgggcatcaaagggttgctcactgccgaggaaaatctcacctggctgtgcgccttgcaccagcctgcgacgcgtgacgcgatctggcaagcgttggctgcggtcgggttgcgcggcttcgaggatgtgccctgtcatacgttatcggccggccagcagcgacgtgtcgggctggcccgtctgtatctgtcgccgccgccgctgtggattctcgacgagccgttcaccgcgctggacaagagcggtgtggcgcagctggagaatcacctggccgcgcattgcgaccgcgggggaatggtcgtgctgacgacccaccattcgctggccgagaaaccggccggcttccgcgagatcgatctggggcagcgagccgcatgagtaacgtcttcacgctgttgctcgcgcgcgagtcccgtctattgttccgccgcccggccgaactggccaaccctctggtgttcttcgccatcgttatcgcgctgtttccgctggcggtcggtcccgaatcgcaattattgcaaagcatctcgcccggcttgatctgggttgccgcattgttggccgtgctgctctcgctggatgggctgtttcggagcgatttcgaggacggctcgcttgagcagtgggtcgtttcgccgcaccctctggcgcttctggtgctcgccaaggtgctggcacactggctgttttccggtctggcgctggtgctactggcgccgctgttgggcctgatgctgggcatgccggccagcgcgctgccggtactgctgatgtcgctgttgctcggcacaccgatcctgagcctgttgggcgcggtcggtgcggcactgaccgtcgggctcaagcgaggagggctgctgttggcgttgctgatcctcccactctatataccggtgctgatactcggcagcggggcgctgcaggcggcactgcagggtttgcctgcattgggttacctgttgtggctggccagcctgacggtgctggcggttaccctgacaccctttgccatagccgccgggctgaaaataagcgtcggcgagtgaccgagtgcacgatgtatctttccgggagcgtaaccgatgcgccgattcgatgggcggccagtacaacgatgaatttattgatcgcgaataagaggcgactgtccggtttcggagcagtatcggccggcgtgttggatgtgaggcaggcgctatgaactggacatggttccacaaactgggttcgcccaaatggttctacgagatcagcagccgctggctgccgtggctggcctgggcggcgttgctgctgatcgtcgcggggacggtctgggggctggctttcgcaccgcaggactaccagcagggcaacagcttccggatcatctatatccacgtgcccgcggcgtttctggcgcaatcgatctacgtcatgctggccgtggccggagtggtcgggctggtctggaagatgaagctggccgacgtcgcactgcagcaggccgcccccattggcgcctggatgaccttcatcgcgctggtcaccggtgccgtatggggcaagccgacctggggcgcctggtgggtctgggatgcgcgcctgacctcgatgctgatcctgctgtttctctatttcggcgtgatcgcgctgggccaggccatcagcaaccgcgacagcgcggcaaaggcctgcgccgtgctgtcgattgtcggcgtgatcaacatcccgatcatcaaatactcggtcgaatggtggaataccctgcaccagccggccactttcagcgtcacggaaaagccggcgatgccggtagaaatgtggctgccgctgctggtcatggtgatcgggttctattgcttcttcgccactgtcctgttgatgcgcatgcgcctggaagtgctgcgtcgtgaatctcgaagcagctgggtcaaggctgaaatcaaggcgatggtgggtcgggcatcatgaatttttcgtcgttttccgagttcgtcgccatgggtcaccatggcctctacgtctggacgtcttacggcatcagcctggcggtcctgattctcaacgtggcgttgccggtcctggcgcgtcgtcgttacctgcaagacgaggcgcgccgtttgcgccgggaggaattgaagtgaatcctgtgcgcaagaagcgtctgtacatcatcctggccatcctggcgggcgtcgggatcgccgtggcgctggccttgtccgccctgcaagaaaacatcaaccttttctacacgccaacgcagatcgccaccggtgaggcgccacagggcacccggatccgtgccggtggcatggtcgaggaggggtcggtgcagcgcagcagcgattcactgaccgtgaccttccgcgtcaccgattacgcgcagacggtcaccatccgttatcagggcatccttcccgatctgttccgcgaggggcagggcatcgtcgcgctcggtcgcttgaacgaagagggcgtactggtggccgacgaagtgctggccaagcatgacgaaaactacatgccgcccgaggtcagctcggccctggaaaaaagcggcaagagcaaaccctacggtgctggcatgcaggagggtgcgaaatgattcctgaacttggtcatctggcaatgattctggcgctgtgcctggcggtggtgcagggcaccctgccgttgatcggcgcctggcgcggcgaccggcagtggatggggttggcgcagccagcggcgtggggccagttctcctttctggcattttccttcgcctgcctcacctacgcgttcatggtggatgatttctcggtcgcctacgtcgcgcagaattccaacagcgcgctgccctggtactacaagttcagcgcggtgtggggcgcacacgagggctcgctgctgctgtgggcattcatcctctcgggctggaccttcgcggtttcgatcttctcgcggcaactgcccgaggacatgcttgcccgggtgttgggtgtgatggggctgatcagcatcggtttcctgttgttcctgatcgtcacgtccaaccccttcgatcgcctcctgccgcaagcgccgatggacggccgcgatctcaatccgctgctgcaggacttcgggctggtggtgcatccaccgatgctgtacatgggctacgtcggattctcggtggccttcgctttcgccatcgccgcattgctcggcggtcgcctggatgcggcctgggctcgctggtcgcgcccctggacactgattgcctgggccttcctcggcacgggtatcgcgttgggctcctggtgggcctactacgagctcggttggggcggctggtggttctgggatccggtcgaaaacgcctcgttcatgccctggttggtgggaaccgcgttgatccactcgttggcggtcacggaaaagcgtggggcgttcaagagctggacggtcctgctggcgattgccgcgttctcgctcagcctgctggggaccttcctggttcgctccggtgtgctgacatcggtccatgcctttgccaccgacccggcgcgcggggtcttcatcctggccttcctgctggtggtgatcggcggctcgctgacgctctttgcgttgcgtgcgccggtggtcaagagccagatcggcttcgggctgtggtcacgcgagacgctgctgctggtcaacaacctgctgctggtcgtcgccacctcgatgattctcctgggcaccctgtatccgctgctgctcgatgcgctgtccaacagcaagctctcggtggggcctccctacttcaacgccatgttcctgccgcttgtcggtgcgctgctgctcgccctgggcgtaggcgtcctggcgcgctggaaggatacgccggtgaaatggctggtcggcatgcttacgccggtgctgatcaccagcgccgtgctcggcggactgggctcgatgctgttcgccgacttccactgggccgtgctggcggtgtgtctgctggcggcctgggtggtcagtgcgggtgttcgtgacctgctggacaagactcgccacaagggcctgctcaagggcatgcgcagcttggccccgagctattggggcatgcaattggcgcacttcggcctggtcgtctgcgcattgggcgtggtgctcaccagccagcagagcgacgagcgtgacctgcggctggcacctggtgagtcgacgcagctaggcggttacagttttgtcttcgatggcgccaagcatttcgaaggtccgaacttcacctcggacaagggcaccattcgtgtcttcgatggcgatcgccaggtcgccactctgcatccggagaagcgcctctataccgtgcagcagatgccgatgaccgaagcggggatcgacgccggactgtttcgcgacctctacgttgccctcggcgagccgctggaaaatggcgcctgggcggtcagggtccacgtcaaacccttcgtgcgctggatctggctgggtgccttgctgatgtcgctcggcggagtctgttgcgtgagcgacaagcgttatcgggtgaaggtccggactcgggtccgtgatgcgctcggtatggccgagcaaggagcctgatatgaaacgactgttgatgttgctgccgctggcgatctttctgattgtcgccgtgtttctctaccgggggttgttcctggatccgaccgagctgccgtcggcgctgatcggcaagccgctgccgtccttctcgttgccctcggttgaagactcacaacggctgataaccgccgaagacatcaagggcaagcccgcgctggtcaacgtctgggcaacctggtgcgtcgcttgcaaggtcgagcacccggtgctcaaccagctggccaagcagggcgtgaccatctacggcgtcaactacaaggatgacaacgcggcggcgcagaagtggctgcgcgagttccacgacccctatcaactgaacatcagtgatgcgcagggcagcctgggcctggatctgggtgtgtatggcgcgcccgaaaccttcatcgtcgacaagcagggcatcattcgccacaagtacgtgggagtcatcgacgaacgcgtctggcgtgagcaacttgccgccctgtatcaggagctgatggaagaatgaagcagctgattcgcgggatactgctgacgctgtgcctggtgggcagcgtgcaggcggcgatcgacgcctatgaattcaataccgacgccgagcgcgagcgctaccgcaccctggtggaagaactgcgctgcccgaaatgccagaaccagaacatcgccgactccaacgctcccatcgcgacggacctgcgtcgcgaaatctaccgcatggtcgaagcaggccagagcaacgagcagatcgttgactacctcgtggctcgttacggtgatttcgtgcgctacaagcccccggtcaatgccaagacgatcgtgctctggtatggcccctatgcgttgctggtgctcggcttgtgcgtgctcgcgttcattctggcgcggcgccggagaagcgccagcgatccatcgtcgaagaccctttcagaggctgagcgcaagcgcctcgccacgttgctggatagaaaaaaaccatgatcgatttctggataggagcgggcctgctgttgctggtcgccctggcgttcctgctgttgccgttgatgcgaggccgtcattcacaagccgaagaggatcgcaccgcactcaacgtggcactctaccaagagcggcttgccgagctggctggccagcaggcggccggcacgctcagcgcggaacagttcgaggcggggcgggcggatgctgcgcgcgagctgttggacgataccgagggtagcgatacccaccgtcgcagcaacctgggccgcgccattccgctgatcgctgcgatcgtcatgccgttatcgggctacggactgtacctgcactggggggcgagcgataagttgcagctggcgcgggagttcgccgaccaacctcagtccatggaagagatggtcgggcgcctggagcgggcggtgaaggctcaacccgaatccgccgaggcctggtatttcctggcgcgcgcctatatgcgcgaggaccgtccagccgatgcggcggcggcctacgagcggttgatcagcgtcgcgggtcgtcagccggacctgcttgggcaatgggcgcaggccctgtatttcgccgagaatcgccagtggtcgccgaagatgcagtcgttgaccgacgaggccttgcagggtgatccgcatgaggtgaccagtctcggcttgctgggtattgccgcctttgaagagcagcgcttcgaggaagcgataggcttctgggagcgtttggtggcaaccctgcccgccgaagacccgtcgcgggccgccattcagggtggtatcgccagggcgcgtgaacagcttggcgagcctgcgacgagcgtggagaagccggctggcgaggcggctgcgcctgcggatgcgggattgaccgtcgaagtccggctggatgcggcgttggccgacaaggtgagccccacggacacggtgttcgtctttgcacgtgcgctgtccggcccgccgatgccgcttgcagtcaagcggctgacggtggccgatctgcccgcgaccgtcaatttgagcgatgccgatgcaatgacaccacagcttcgcttgtccaacttcgaacaggtcaagctggtcgctcgcatctcgcgcgatggcaacgccactcacggccaatggcagggcagcagcggcccgctggcgccgaacgcggaaggcgtggccaagctgaccatcgatcaatcggaggcgccctgatcgcagggccaagaggcagaacaatggcgagcgattcgtttccgtcagcggcttttcggttgtcccggctagcgagcgtaacggcgctcgccttgctgttgggtgcctgcgccggcaatccttaccagacgtccgagcccagcagtcggccgatcccgccagccccggcaccgcgtgagccggtcgtcacaccgccaccggtgcgtacgccgccggcgccgcgtccaccggcgactcagaagagccatccacgctatgcgccacctcctcatgcggctgcgcactgggacaatcgcctgggcgtctatgtcgtggaggggcgggacctgttctaccgggagcgcctgtattaccgctgggatggcgattggtattgcgccgggcgcccggacggcccctgggagccggtcgcgccgcccagcgttccgaccggattgcgcgggctgcactgattccgccgagctggcgactaccgaccatcggcattaaaggcgcgtcggtggctgccgataagggtctcaggtacagcgagccgctggccagccgcgcaggcgtaaccatcgtcattcttcacccggagcaagtccatgagtgcagcagtcaaacgtcttgaggaaaccggcaatgcgctgcgtgatgccttggcccatcaagactggactgccatcagcgttctggatctgcaatgccgacaggttgtcgaagccgcggtggctgcatctggcgaggacgcgccggctattcgcgagggcttgcaggagctggtagggctctatcgtgaactggtcacaacctgccagaccgagcagcagcggattgccgacgagctgcgacagctcaatcaatcccggcaaggcgcgcaggtatacaagctgttcggctgagcgctggctagccttccaatgctggcgctataaacaacagactatcgccaaccgtggcgcaactctcgcagccggcactttcgcctcgggcctcgaattgtccgtatcgtggctacggattcgaagacgtccatgatccggatcatcgaccccggcaggccgagagcgcttgcagtgcattttcctgttctgcatcaatactcagcgtccttctctatacttttgtcgttgaatcacgtcataaatttgactcgagtcgttttttttaattaactaccgactatctgccgacgatgtggccgtctctacgagacgagcgcaggcttcctttcagcctctagagctataaacaagatgtggcgtgaaaccaaaattttgttgatagatgacgaccatgaccgtcgccgtgacttggcggtcattctcaattttctgagcgaggatcatctggcctgcgctagcaacgagtggcaggacgtagtcggtgcgctggagtcgagccgcagcgtgctaggcgtgatgcttggcgatgtgtcggccaagggcggggcggtggagctgctcaagcagatcagcaagtgggacgagaacttgccgctcatgctgatcggcgagcccgtgccggcggattggcccgacgagatccgtcgccgtgtgttgaccagcctggagatgccgccgagctacaacaagctgctcgattcgctccaccgggcccaggtctaccgggaaatgaacgaccaggccaaggcgcgcgggcggcaacgcgagcccaatctgtttcgcagcctggtaggtaccagccgcgctgtacaacatgtccggcagatgatgcagcaggtcgccgacaccgaggccagcgtactgatcctcggtgagtcgggtactggcaaggaagtcgtcgcgcgcaatctccactatcactccaagcgccgtggagggccgttcgttccggtcaactgtggagcgattcctgccgagctgttggaaagcgaactgttcggtcatgagaagggggcattcaccggcgctatcacctcccgggccggtcgtttcgagctagccgaagggggcacgctgttcctcgacgaaattggcgacatgccgctaccaatgcaggtcaagttgctgcgggtgctgcaggagcgcacgttcgagcgcgtgggcagcaaccgaacgcagaatgccgatgtgcgcatcatcgctgcgacccacaaggacctggaaaagatgatcgtcgacggaagtttccgcgaggatctgtattaccgcctcaatgtctttccgatcgaaatggcgcctctgcgcgaacgcattgaagacattcctctgttgatgaacgaactcatatcgcgcatggaacatgaaaagcgcggctcgattcgcttcaactccgcggcgatcatgtcgctgtgccgtcacgattggccaggcaatgtccgtgagctggccaacctggtcgagcgcatggcgatcatgcacccctacggtgtcatcggcgtgatggagctgccgaagaaattccgccatgtcgacgatgacgacgagcagtacgccatcggcatacatgacgagatggaagagcgcgcggcgatcaatgcacccatcgttagcgcggacgcgcatgcgatgcttcccgctgaggggctcgatcttaaggactatctgggcaatctggaacaagggcttatccagcaggccctcgacgatgccaacggagtcgtcgcgcgtgccgccgagcgtctgcgtatcaggcgaaccacgctggtggagaagatgcgaaagtacggcatgaaccgtcgcgacgacgatctcgacgagtgagtgccggccacgcggccgaccggttgcgtggttcccgcttgaaaatcaccaggcatgatccttgctgaggtagctgcaccgaccatcttttgacggatagtgcagtgacctcagcgtccgcctcatcaccttcaaccccgccccagggcgaatcggctgccgagcttgaacagtcgctcgagctgatcgctcgggtatccggccgtctgggtgaatcgcaacagctgctgcaggcacgtgttgccgagcttaaagggcagttggcggaaaccagcgcaaagggcctgcaggcgttcgacgagaaagagcgtctggccagccggctgcagagcctgttggacctgctgcccggcggcgtcatcgtcatcgacgggcagggcgtggtccgtgaagccaatcccgtagcgctcgagctgctcggcatgccgctcgaagggactctttggcgcgaggtgattgcacgcagcttcgctcctcgcagggatgatggtcacgagatctcgatgaaggatggccgccgcgtatccattgccacgcgctcgctcaatggcgagccggggcaactggtgctgctgacggatatgaccgagacccgaagactgcaggagcaactggcgcgtcacgagcgtttgtccgcgctggggcggatggtggcttcgttggctcaccagatccgcacgccgctttccaccgccctgctttatgccagccatctggagcagggcggactgtcagccgaacaacaacagcgcttcgctgggcggctgaaagaccgtttgaacgagctggagcatcaggtacgcgacatgctggtgttcgcgcgtggcgacctgccactggaggatcggctggccccggccgacttgatgagcgcgttgcatgccgcggccgcagcgcgcctggagggtgttgcggtccgctggcaatgcgatgcctccggtggttcgcttctgtgcaaccgcgacaccctggtgggtgcgctgctcaatctgatcgaaaacgcgctccaggcagcgaacggcgtgccgcggctgaaagtgcatctgtatgcgcgagggtcatggctgtacgtcagtgtcagcgacagcggggttgggatggatgccgcgaccctggcgcgactcggtgagccgttcttcactacccgggcgaccggcaccgggctgggcctggcggtcgtcaaatccgtggcgcgtgctcactcgggtgcgctcagcctgcgttcgaggctcgggcgaggaacccgagtcaccttgcaattgccagtgcttccggcgcttgcaccgtccacttcggagtgaccaccatgaccgcaacgattctgttggtcgaagacgaccgcgctttgcgagaggcattgggcgatacgctcgagctcggcggctatcgctaccgggcggtggacagcgccgaagcggcactgctggcgctgagcaacgaagacttcggcctcatagtcagcgacgtgaacatgcccggtatggacggccacgagctacagatgctggttcgccagcgccatccgcaggtgcctgtcttgctgatgaccgcgtatggcgccgtcgagcgggcggtggaggccatgcgtcaaggggcggtggattatctggtcaaaccgttcgaaccgaaggtcctgctcgggttggtcgctcggcatgcttgcggacagcttggtgcggcagacctggaggggccggtggcggtcgagccggcgagccgtcagttgcttgccctggccgcgcgggtcgcacggagcgattcgaccgtgctggtttccggcgagtcaggtaccggtaaagaggtgctggcccgctacattcatcagcagtccgcgcgcgccaacaagccattcattgcgatcaattgcgcggcgatcccggacaatatgctcgaggcgacattgttcggccacgaaaagggtgcgttcaccggtgccatcgcgacgcagccgggaaagttcgaactggccgaaggtggcacgttattgctcgatgaaatatccgagatgcctttagcgctgcaagccaaactgctccgcgtgctgcaggagcgcgaggtcgagcgcgtcggcgggcgcaaaccgatagcgctggacattcgtatccttgccacgaccaatcgcgatctggcagaggaggtgcgcagcgggcgcttccgggaagatctgttctatcgcctctcggttttcccacttgcgtggccgccgctgcgtgagcgaccggcggatatcgtgccgcttgccgagcgactgttgcgcggtcatgcggacaagatgcgccaaaccggcgtgcggctcggtgacgaggcccgccagtgcctgctcgagcatccctggccgggtaacgtgcgcgagctggacaatgccatccagcgcgcgttgatcttgcagcaagggggcatgatcctgccggaagatctgtgcctgaacgcgaccatcggagcgatcccatcccgtactgcgatgcctgcggctcgcccggccatggtgcctccggcacagaccgaaacggccggcgcgctgggcgaggaccttcgtcgccgtgaattcgagttgatcctagatacgctgcgtaccgaacgcggccggcgcaaggagaccgctgatcgcctgggtatcagtgcacgtaccctgcgttacaagctggcgcagatgcgtgatgccggcatggatcccgaggcagccctgcgccgggcttgaatcgagcggcgaaacgcggctctgataagctaccgtcatcagcgctgacgaggaattggctgtggacgaaggcttctggcaacgacgttgggcacgcaacgaaattggttttcatctgaacgaggtcaacccttacctctgtcgtcactggcctgaattgcggctgaccgaaggcggtcgggttctggtgccgctatgtggcaagagcctcgacatggtatggctggcccaacaaggccatgcggtactcggcgtcgagttgagcgagcgcgccgtcgaggatttcttccgcgagcaaggcctgaatgccgagctcagcgtgcagggcgaattccgtgtctatcgcgccgggactctggaaatccgttgtggagatttcttcgcgctcagtgcagctgacgtatccgactgccaggcggtatacgaccgcgccgcgctgatcgccctcccggatgccatgcgccagcgctacgtcgagcatctcgataagatcctgccgcccagctgtcgaggcctcctgatcacgctggactacccgcaggagcaaatgtccggccccccgttcgccgtgagcgatgcggaggttcggcagagcctgggtcccacctggcagatcgaattgctggagcgggcgagcgtgctcgacgagcgcaactggaagtttctccagcgcggcctgacgcgcctggaagagagctgctacaagctcgacgggcggttgcagcgcgactgaatgcttggatgcggtgtactggaagcagtgcattcgtttgatcgcggggcgctgacagggcgctcccgcatcgtcataaaacctgggcgaaaaaaaggggcggctaatgccgcccctgtttcgatcgttcgattcagccgcgctgacgcagcgcttcgatacggtcatccagcgaggggtgcgtcatcagcagtccggcgaggccgttgcgcagcgcgccgttgatactgaatgccttgaggctgtctggcatgtcgaccggcacgccttgttccgcctgcagtcgctgaagggctccgatcatggcacgggtgccggccagctgcgcaccggcctcgtcggcgcggaactcacgtttgcgcgagaaccacatgacgatgatgctggcgagaatgcccagcaccagctcggcgaaaatggtcgcgacgaagtagccgatgccgtggccttcttcattcttcaagatggcgcggtcgacaaagctcccgaagattcgcgcgaagaacatgacgaaggtgttcaccacgccctggatcagcgcgagcgtcaccatgtcgccgttggacacgtggccgatctcatgcgccagcactgccttgacctcatccggcgagaagcgctcgagcaggccctggctgaccgctaccaaggcgtcgttcttgttccagcccgtcgcgaacgcgttggcttcgtaggcgggaaagataccgacttccggcatcttgatgccggcgtcgcgggacagctgctcgaccgtttgcagcagccactgttcatggcgcgtgcgaggctggctgatgatttcggtccgggtgctcattttcgccatccacttggagatgaacagcgaaaccagcgcaccggcgaagccgaagacggcacagaacaccagcaggctgccgtagttctgaccggtgtaacgatccactccgagcagcttcagggtgatgctggcaacgaccaatacagccaggttagtggctaggaacaagaaaatgcgcatcatatttgcggcaaactccaagaggaacagtaaagaacgataggctatataaggtgcgggtcggcgctattcaaccgggcgactatttcaagctatgtcgccttgtcgccgggtgcgctcatgaacgcccggatggcgcctggctgagtagctgtcgagtcagctgcgcgaggcgctcgccatgcccttcacgtagcgcctggcgcaattgatgggccaggctcgaatgtatgcggcgcacgctggcaggcagatcgtcgcggtcgctcgcaggctcggagacgctgccggtgagccgcagaaaagccttctcggtcaatactgcctggtcgatggcgagaaaatggagggtgctttcgaagcgcaggtaaccctcatcggccagccataccagcgcgcccaggcagctctggtggcgcttgctgggcaggccgaactcgtccggctcttcatgtccgatgaggtcttcgacgtaaagcgtgatcttgcgcgggaacgcctgatagagcatcagcaggccggcggcggcgtcgtggtagaagtcgtcgacctgcagatccatcgctgattactgactataggtcttcaggaagctgccgatgcggccgatggcctgctcgaggtcgtcgacccggggcagggtgaccacccggaagtgatccggccaaggccagttgaaggcggtgccctggacgatcagcagtttttccgacaacagcaggtcgagtacgaacttctcgtcattgtggatcgggcaaacctttggatcgatccgcgggaaggcatagagcgcgcccatcggcttgacgcagctgaccccggggatgtcattgagcagttcccaggtgcggttgcgttgttcgagcagacgacccggtggcaacaccaggtcgttaatgctctggtagccacccaaggcggtctggatcgcatgctgtgacggcacgttcgcacacagacgcatattggccaggatgtcgatcccttcgatgtagctctgcgccttgtgcttgggtccggtaattaccacccagccggagcggaaacccgccacgcgataggacttggacaggccattgaacgtcaggcaaagcacgtcgggcgccagcgaggccgtgcagacgtgcaccgcatcgtcgtagagaatcttgtcgtagatctcgtcggagaacagaaccagcttgtgctggcgggccagctcgaccatgccctccagcacctcgcgcgggtacacggcgccggttgggttgttcgggttgatcaggaccagtgccttggtattgggcgtgatcttggctttgatatcggccaggtccggccaccaattggcttgctcgtcgcacaggtaatgcaccggcttgccgcctgcgaggctcaccgcggccgtccatagcgggtaatccggcgcggggatcagcacttcgtcgccattgttcagcaatgcctgcatcgacatcacgatcagctcggaaacgccgttaccgaggtagatgtcttcgatggtcacgccttctacctgcttttgctggtagtactgcatgatggccttgcgcgcgctgaacaaccctttggagtcgctgtaaccctgcgcggtgggcaagttgcgaatcacgtcctgcaagatttcttcaggggcttcgaaaccgaacggcgccggattgccgatgttcagcttgaggatgcgatggccttcctcttccaggcgtctggcgtgcttgagcactggcccacggatgtcgtagcaaacattggcgagcttgttcgatttgctgacctgcatgatcctgagtgtcccgaagtgaagacgcgcccggctcttggtggctggcgtcgtttggcatgaacccgggcgccttggcagccggaaaccccgctgccagactaggcgtctaagagcaacgcatcatacgtgcggcccgacccccggaaaaggtacagatccgccttatttgagagagggtctgtatccgcttcgtccgcggccgcgtcggccccggctcgtcgagtcgcggcgaaacggaaacagaccctaaacgaggtgtaccgatggacaagcttgaaaaaccgctcgaggcctggcgtgaagagctctccgacgagcaattccaggtctgccggctcggcgcgaccgagcgcccgttcacgggcaagtacaacgagaccaagacaccgggcatctatcactgcgcctgctgtgatgcgccgttgttcgattcggatgccaagttcgattccggctgtggctggccgagctactttcaaccggtcagtgacaccgccattcgcagcctcgacgacttcagccacggcatgcatcggatcgaggtcaagtgtgcccgctgcgatgcccatctgggtcatgttttccctgacggcccggcgccgaccggcctgcgttactgcatcaactccgcatctctcaaccacaagccgcgcgaggcctgaaccgccatcgcaacgcctcatcaggatgccgccatgcgcgatccgctgctcgagattccctgcacgaccatcgatggccgacagacgacgctcgccgatttcaacgccaaggcactgctggtggtcaacacggctagccagtgcggcttcacgcctcagtacaaggggctggaagcgctctggacccgctaccgtgaacgtgggctggtggtgctcggctttccctgcgaccagttcggtcaccaggagccgggcgacgaaggggagatcgccgccttttgcgagcgcaacttcggtgtcagctttcctttgttcgccaaggtcctggtcaacggcggcgaagcccatcccttgttcgtggcattgaagaagcgggcgccgggcttgctaggcagcaaggcgatcaagtggaacttcaccaagtttctgatcgccgatgagggccggacggtagagcgattctcctcgcgcacgccgccggaggcgttggctgcgcgtatcgaggcgcatctttagtttccccgctgcgccatttctgagtgttgcgtcagcatcaaccgcatttttgtctggagtctttttgatggatgtcgagctgaaagcctttctgcagcgtgccgatgcgttgatggcgcgtctggaaccgttgctgccagccacaagagcgccgatcgactgggcagccagtctcgccgcacgctggcaccgtgaagggcagggcgggtacctgcagtcgctgagcgtgtcgctcgacctgaacctggcagatctgatcggcatcgaccgtcagcgggagctgttatcgaacaatacgcgccagttcgtttcggggttgcccgctaatcatgtcctgctctggggcgcgcgtggcaccggcaaatcctcgcttatccgcgcgctgctggccgagcacgcctccgcggggctgcgcctgatagaaatcgagcgcgatcatctggcggacctgccgaaggtcgtcgatcagctatccgggcagccgcactatttcgtcgtgttttgtgatgacctttcattcgaggccggcgagggcgattaccgcgtactgaaaagcgtgctggacggctccctggagcgagcgccggaaaacgtacttctctacgccacctccaaccggcggcacttggtgcccgagcggcagagcgataacgaaaactggcagatgatcgatggtgaactgcatcccaacgaagcggtggaagacaagatcgccttgtcggatcgctttggcctgtggctctcgttctacccgttcagccaggagcattatctgaacgtggttcggcattggatcggctcgctcgccgagcaggcagggctgagctggagttgggatgaagcattggagaaggacgcgatccgctgggccactgcgcgtggcaatcgcaacgggcgctgcgcttatcaatttgcccgacagtgggtgggcattcatctgctttgaggtgccttccataaaattggctcggcgcgggctggacgccgtgtaggaggcccgacctcggggcgaagcttttgcttttcaggtggctacgagtctgcattcgccgcgggtcgcggctcccacaaatgagggcgcgtgcactgttttcgtgggaggcccgacttcggggcgcttttgcttttcaggtggctacgagtctgcattcgccgcgggtcgcgcctcccacaaaatgagggcgcgtgtactgtttttgtgggaggcccgacctcggggcgaagcttttgcttttcaggtggctgcgagtctgcgttcgccgtgggaggcggctcccacaaatgagggtgcgtgcactgtttttgtgggaggcccgacctcgggccgaagcttttgcttcttgaggtggctacgagtctgcattcaccgcaggtcgcgcctcccacacaatgagggcgcgtgcactgttttcgtgggaggcccgccctcggggcgcttttgctttttaggtggctgcgagtctgcattcgccgcgggtcgcggctcccacaaatgaggtcgcatgcactgttttgtgggaggcccgacctcgggccgaagctttcgcttttgagtgaggtggctgcgagtctgcattcgccgcgggtcgcggctcccacaaatgagggtgcgtgcactgttttcgtgggaggcccgacctcggggcgaagctcttgcttttgaggtggctgcgagtctgcattcaccgcaggtcgcgcctcccacaaaatgagggcgcgtgcactgttttcgtgggaggcacgacctcggggcgaagcttttgcttttgaggtggctgcgagtctgcattcgccgcggggcgcgcctcccacaaattgagggcgcatacattgcttttcgtgggaggtccgaccccgggccgaagctttggtgagacctcagctgggctgggtcgccttcttgcccatttcgatgagtttggcagtggtccgctgctcacccggcaacacgctctgcaccgacggcagttctttcattttcgagaagtgcgcagccaaggctggccaacggttcgcgtcgatcagctcgccgccgtgctccatattgatcaactgacaggcgaaggcgatgtcggccatcgacagctggtcgccaacgaagtacggcttagtgcccaactgaccttcgagatagtcgaagtgaggcggaagcttctgggtcagtgcgctctgcacgctttcttcgttgcaagggtggcccgaactcggtttcaacacgcggttgcggaaaacgccgaacgtcgtcagaggcgcaagctcgtagtcggcgtatttttccagccagcgtatttgcgcacgctccaccgcgtcacttccgtacagccgagcggtctgctcataggactcttcgaggtattggcagatgacgctcgaatcggccaggcaaagatccccatccttcatcgccggaatgcgccccagagggttgagctgcaagtaccactcgggcggagtgaagggcatgacgatttcgagttggtagtccaaacctttttccagcagacagagacgcaccttgcgaacgaagggcgagagcggggcgccgaatacagtcagtgacatcgaaactctccatgcggacaaaaaagatgaaggctgccgggcgccaggagctgcgcatcaatcctgcgcaccgaaaccgcatgggtgcgtttcatggttcgaactagtggttacacctgtcccggtcgagcctaatagatattgtttttcttccagtcgtcttcgctttcaagcgttttcaaaccttcggccagctcgctgggctcgtcaagcttgggttgctgttgtgtctgctcgagcttgttggcgtgggcatagttcgcttcgagcggtttcagcagagcctggtactccgccgggttgggttgcttgcggatatgctggataccgcgttcgaaggcgaggcgtgccttgtgtgcactgccttgttgtagcgcctgttggccgatgttggtgaagtactccgcgtgcagcagcaccatcattcgctggatctgctgcaaccagcgtttggcagccggggtgtcgagctgctgttgcttgttcgcccagacgatctgcgcgtgcaggtcttcgagcaacaaccggacttccttggcctgcgcctcggtggtcaccttgaccggcgcgttctgaaccggaatgtcgtcgcccttggccacagcgccgcgcagcgtgtcgattcgtgtgctgagcacagcgttcttcttgtccagcggcagcagctgttcgccgaggtgcaactccaggcgcgctagcagcaacttcagcggcggcgtcatcatctggccgggcatgtgatcggataggttggcgcagcgccgcatacggtcgctcagctcggcgcgtaagcgcgccttttccaggttgttcttctctacgatctgattgatcacgccaatcgctatcaatatgaacaggccagcaatgaccaatcctgtaatcagaaccggggacacaagtcgcacctctctaaccgggcggtttatgccgagtgtagagcgttggatggcaagctgatagctcgacactaccgacagcttcgacgccgaaaaaaattttcacatgacgcttgacgcctctgggtagggtccatagaatgcgcgccacttgcagcgtgaagcacatcgcagacgctgaaagccggaatgaaagctgtagtttccgggctgcgtccccttcgtctagtggcctaggacaccgccctttcacggcggtaacaggggttcgagtcccctaggggacgccacttttgctgtaagttttgcgggaatagctcagttggtagagcacgaccttgccaaggtcggggtcgcgagttcgagtctcgtttcccgctccaaatatgcttctagccttgtccaaggtaatgaagcgcagaaaaagcgacctaagggtcgctttttttgtttctgcgctctgccgcccatctggcgcttcgtgttgggctcgcaaacacgccaatgctgcttttcgcctgcatgccgcatgctgcgaagcgaggggcagttgcgtgctcgcttcgaaaatcctcctcgctgtatcgccgactgagagcccccatgatccgcttgaaggcgcgcctggtcattttcatcttgttttgccgagtcgcaacatgagggtgcgcgggtaactccgtgaggttgggcctcgctgtgctcgcaggcgggctggaagtatccggcgatgcgtctgcctccgccgaagcccctcaaatgccgcttgtctttcaatatataaaaaaatatattgtttttcgtttaattgttgagagcagccatgactcccgatcttgatctcgaccagctgaaagccaatgcggcatccgcttcggcattgttaaaggcgctcgctaatcctgatcgcctgctgttgctgtgccagctgtcccaaggcgaacgcagtgtcagcgaactcgagcagcttctgggtattcagcaacccacgctgtcgcagcaattagctgtgttgcggcgcgaagggttggtggtaacgcgccgagaaggcaagttgattcactaccggatcagcagcccagaggcgttggcagtgatcaccacgctgtaccggctgttttgcgaggagcgccagcaatgacgatcgactgggctcatttcacgccgtggactgcgttgggcgggggtgtgttgattggcgcggctgccagcttgttcgtactgctcaatggccgtatagcaggcatcagcggcctgcttgccagcgtgctggagcctgctgcagaaggtcgtggagaaaagctgttgttccttctcggcttgctgatggctccgctcctgtgggggctgtttggtgcgctgccggccatggaattccagtctggctgggtcgggctgctagtggccggcctgctggtcggtgtgggcacacgctacggcgctggctgtacgagcggtcatggcgtctgcggaatcgctcgcctgtcgccgcgctcgatcgtcgctacgctggtgttcatggcggccggtttcgccacggtttttctcctccgtcatctcctggcaggttgatatgcgcaagttggcttcattcattgccggcctttgcttcggtcttggtctgctgctttccggtatggccaacccggcgaaggtgattggcttcctggatcttgcgggtccttgggatccgtccctgatgctggtgatggtcggggcgattggtacggcgttgctgcccttcagctgggcaaagaagcgcgagcgttccctgctcgatgctccgatgcaactccctagccggcgcgagctcgacgggcgactcatcgccggtagcctgctgttcggcgttggctggggcatcgccgggatctgccccggaccggccattgcaatcttgctcagtggtcactggcagatcgccttgttcgtactggccatgctgggcgggatgttgctgttttccgcgcttgaacgccggcgcgcttgctgtccgggaagccattaggaaagccaccgtagcaaccattgattggtcccgatcattccggcctcggtcccggtatcgaaaccgccggcagccaccttctcgggcaagtcgcctaacttggcgctggtcgacgccatgcataggcgaggcccgcttccaaactcggcgagtcggttatggtcatagccataagacgctcgtagtgccccgcgtagattgatattcgcgggtcgctcgcagctcgatcgcccatgcgtctccttacgttgcggcaggcgacaaacatcatttcggggccttattcatggcaagcactcaaagcgccgcagcgacgctacgcgcggcatggatcgcgcacgctcaggcaaggcctatcgtcacgcttggcctcatcggcacggtcttggttgtactgacgttgtcgatcgcaagcggttataacgccttccagaacggcaacgagagcaacgtccgctacgcgttgctcggcggctgcgccggcttcgctgccacggcgctgggtgcgctgatggctatcgtgctgaacaatatttccacacgcacccaggacagcatgctgggcttcgctgccggcatgatgctcgctgccagttcgttctcgctgattcttcccggcctggctgcggcccgtgagctgttcgacagcggagcagcggcggcgttaaccgttgtggccgggcttgggattggcgtgttgctcatgcttgggctggattacttcacgccccatgagcatgaaagcgcaggtgccttcgggcctaaccatcagcgcatgagccgggtctggctgttcgtgttcgcgatcgttctgcacaacattcccgaaggcatggccatcggtgtgagtttcgccaacggcgacctgaacgttggtttgccgctcaccacggcgatcgccatacaggacattcccgaggggctggctatcgcgctggccttgcggaccaccggcctctccgccgggcgatcgatattggtcgctgcagcgtccggcctgatggaaccgctcggcgctttggtcgggctgggaatctccagcggcctggccgttgcttacccgatcagcctgggtctggcggccggcgcgatgatcttcgtggtttcgcacgaagtgatacctgaaactcaccgcaacggccatcagacccccgcaacagttgggttgatgggtggtttcgcggtcatgatgtttctcgataccgcgttcgggtagacgcccttcgtcggttcggttcgggcgctcaatccgggggaggggcgatgctcgccgtggccgtcgcgcttggtcgacggccccgcgtaggtgtagctgtctgctatagctgctcgagcaagcgacgtgcggcttcctgcccgctgagccaggcaccttcgacgcggccagagagacaccagtcgccgcaggcatacagcccgagatgggcgtcggccagcgcgccccattcatgggactgggcagggcgcgcgtagagccagcgatgtgcaagggtgaattccggtgcaggcaccacgcagtcgatcagttcagcaaaggcaccgagcagttgctcgatgaccagttctcgtgacaggtcgagatgctgccggctccatgcgctgctcgcatgcaggacccaggtatccagcgaaccatcgcgccccggcttgctgcggtggcgcgccagccagtccagcgcgtcgtcctgaacgaaacaggcttcgagctgggtttcaagcgctgtcggaaaacccagcgccaccgaccaggtcggctccatggcaacgctggctgcaacggcggccagcttcggtgccgaggccagcagtgcgctggcctgaggcgccgggatcgcgatgattacctggctgtaaggcccatggttgtttccttcggcatcgaccagcgtccagtattcctcaccccgaaacgcctcggtgacccggcaggacagcttgaccggcagctcgccgagcagcccggcggctatcgcgctcatacgcgggatgccgacccaacgcacttgctcgtccgcagaaggcgacagctgaccgtcacgggactggtagatattaggcgaccactcgctgacccagccgtggctctgccattgccgcacggcttcggtaaagcgccggtcgcgtgcggtgaaatattgggtgccaaggtcaaggtgaccggcgtcgctgcgcttgctggacatgcgtccgccgaggccgcgactcttgtcgaatagctgaacggactgtccggccgcatgcagtgcctgcgccgcggagagccctgcaatgccggtgccgacgatggcaatgggagctgtgctcatgcttacctctttcgatagcgccgccagactccgctgcgcgacaactgcgctggttcgttcggtcctggtgccgttttgggagaaaaacggcaacgctgatgcgttccctatcctcaaacagaccgtaggttttgcataggggttcgggtcgatagaagacgcaaggtgaggatattttcagtctggctgacgggcggcgtgctcggctcgtatggctacgccaatcacgagctgcctgctctgacgggcgcatcaggcgttacctgtggttgcggtggggtgacgacgcagcgaatgttcataaaaccgaaacaggctgcaatcatcgtgacctgttcgtccaggggtagcgcgctctccgcagggtgcaccgggcgcggccgcgccggactggtcggcatttatgctgtttgtactaatgcttgagcggtcaatgcgttagcgcgtgaagggactggttgtaagttgggaataagccggtacaatggcgccgctcgccgccaggcgggttttgttatggtgggcccttccggtccccccgcaacgatcaaccgtgaacccggtcaggcccggaagggagcagccgcagcggtgacattgtgtgccggggtgtggctggtggggttcacctccatgacatctatctatatcccttcttttattactgccctggtgccatcggctccggcgcatgctcgtgtctgtcgtttgcgcccgagcggccaccgagcccgtattctgatgcccccacgcggcacacgcggacgcagtatgggcttttttgaaaaggagcactggtttgtcggtcaaagcgagctgggacatcttctgcgtcgtcgtcgataactacggcgacattggcgttacctggcgtctggcgcggcagctggtggccgagcatggccagcgggtgcggctgtgggtcgacgatctggacaccttcgcccggctttgcccgggtaccagcgccacagccagtcagcaatggcacgaaggcgtcgacgtgcggcactgggcgccggactggccgggcgccgagccggcagatgtagtgatcgaagcattcgcctgccagctgcccgccccctatatcgaagcgatggcccgtagcgagcggcgcatcctctggctcaacctggaatacctcagcgctgaagactgggtggtgggttgccatgcgctgccgtcgatgcagcccgatggcctgcaaaagtacttcttctttcccgggttcgagcaaggcaccggtggcttgattcgtgaaggcgacctgctggcgcggcgagaaaccttccagcgcgatccgaagctgcgcgaagccttcttgcaaggcttcggtctgagcgcgcagcccggcacgcggatgctatcgctgttcgcttatgaaaactgcgcagtggcgggatggctcgacgcattggcggccgactcgcggccatcgctcctgttagtccccgaggggcgtgttctgggcgacgtggcaagctggttggaactcgatgaactgagcgcaggcgaccgccatgcccgcggtgcgctgcaaatcgcggtgctgccgttcatgacgcagaaccagtacgacatgctgctgtggtgctgcgatttcaacgcggtgcgcggcgaggaatcttttatccgtgcgcaatgggcaggtcgtccgttggtctggcacatctacccgcaagaggaagatgcgcattgggacaagctcaacgccttcctcgagctctacctgcacgacctggagcccgccccggctgctgcgttgcaaggcttctggcatgcctggaactcaggggagggaagcggggcagcctggtctgcgatgcttgaatacgagcccgagctgcgcgttcatgctgaacgctggacccataagcaggttgccaacggtgatctggctggaaagctggtgtttttttacacagattggctatgatacgcggcctgttttttgtctctaattccattcggatattcgtatgaaaaccgcacaagagttccgtgccggccaagtggccgttatcaacggcgcaccctgggtcatccagaaagccgagttcaacaagtccggtcgtaacagtgccgtcgtcaagatgaagctgaagaacctgctcaacggttctgctaccgagactgtgtacaaggccgatgacaagctggagccggtaattctcgagcgcaaggaagtgacctattcctacttcgccgacccgctctacgtcttcatggacgaagagttcaaccagtacgaaatcgaaaaagacgacctcgaaggcgtaatgaccttcatcgaagatggcatgaccgacgtctgcgaagccgtcttctacaacgacaaggtgatttcggttgaactgccgaccaccatcgttcgtgaaatcgtctacaccgagccgtccgtacgtggcgacacttccggcaaggtcatgaagaccgcccgcctgaagaacggtgccgagctgcaggtttccgccttctgcgaaatcggtgactcgatcgaaatcgacacccgtaccggcgagtacaagtcccgtatcaaggcctgatacagcctacgcggacaagcccggcctgacgctgggcgactcgatgacaaaccccgccttgtgcggggttttgtttttctgggatctggtaattgccgcggggtgcttcccacaaaagcggctcggtgcgcgctttggctttctttgtaggagccccgccctcggggcgcagcttttgctttttgagcgggccgcaagcccccattcgccgcgggtcgcgcctcccacaaaatgcggctcggtgcgcgccgtgctttctgtaggagccccgccctcggggcgaagctttgcttttgagccggctgcaagccggcattcgccgcgggtcgcggctcccacaaaaggcggctcggtgcgcgctgtggcttcttgtaggagccccgccctcggggcgaagcttttgctttttgagcgggccgcaagcccccattcgccgcgggtcgcggctcccacaaaaggcggctcggtgcgcgccgcggcttcttgtaggagccccgccctcggggcgaagcttttgctttttgagcgggccgcgagctcgcttcagccgccccagatccagcccaccagcaggtagcagagcagggtgaccagtacgacgccaaacaggttcagggcaaaaccggctttgatcatggcctggatcggcagctggccggtgccgaacacgatggcgttcggtggcgtggccactggcatcatgaaggcgcagctggcggcgacagcggccggtatcgcgagcatctctggcgacatgccctgcgcgaccgccaacgcacccagcaacggcagaaaggcggctgccgttgcggtgttggaggtgatctccgtgagaaaaatgatcaccagcacgaccagccccatcatcaagaccagcggcagggcctcgaatacacccaggctttcagcgatccattcggccaggcccgatgcaccaatgacgccagccagcgacagcccgccaccgaacagcagcaacacgccccacggagccttgtttgcctgctcccagtccatcaggaagacccgctcacgcaggttcaccggaatcaggaacagtgccagggcagcggcgatggcaatgctggtgtcattgacgccttccacatagtcagcgagcagaggctgcagaatccacgcggctgcggccagcgcaaataccgccgcgaccagcttttccgctcgggacatggggcccagcgcggccatttcgctttccagaaggttgcggctgtcaccgccagcgaacttgaagccgccacgcgtcaaccaccaccagatgaagatcagcatgccgacactcagcggaagccccagtaacatccactggccaaaaccgatctgtacgtcgtagttgtcccgcatgaacgcagccagcagcgcgttcggcggtgtgccgatcagcgtggcgatgccgccgacactggcggcataggcgatgcccaggagcagggcgatggcgaagcgcccgccttccttttcgtcgctgccggccaccagcagactgattaccgacaggccgatgggcagcatcatgatgctggttgccgtattgctgacccacatactgatgaacgcggtggcgatcatgaagccggcgatttgccggctgggctggttgcccaccgccagtagcgtcgcgagggcgatccgccggtgcaggttccaacgctgcatggccaagccgagcacgaaaccgccgaagaacaggaagatggtcgggttggcatagggcgcggtggccttggccaggctgtcgatacccagcagcggaatcagcaggatcggcagcagcgaggtcgcagggatagggatcgcctcggtggaccaccagatcgccatcaatccggccagccccaccgtcagccaggctttgttcgacaggccgcccggcggggaggtcagcatgcagacaagcaacaacaagggaccaagggccagcccaatccaggcggccagaacagcgcctttgcttttggacgattcagtcatggcaagcaaaattcctttacgacagctagcaaggtgccgagcccgcgccagcgacgtgctcggcttctaatacgccgacccgaggcggtgccgttcgttcgatatagctattcagcggacgttgggataggcgcctcggtagggcggccagctgtcgaagtgctctggcaattcacgcagccgtaaaggtgaaatcctgctcccaagggctcgtcggccgagcctttgggcgagcggcgggcaagcgtcagcttggccgcacctgcttcagcgtctcggcgatcaggaatgccatttccagcgactgatcggcattgaggcgtggatcgcagtgcgtgtggtagcgatcggagaggccgtcctcggtgatcgggcgcgagccgccgatgcactcggtgacgttctgcccggtcatttcgatgtgaatgccgcccggatagctgccctcggcgcggtgcacctcgaaaaactgccgcacctcggccaacacccgtgcgaaatctcgtgtcttgtagccgctggaagccttcatggtgttgccgtgcatcggatcggagctccacagcactcggcgaccttcgccctgcacggtctggatcaggcgtggcaaaccttcctggaccttgtcggcccccatccgcacgatgaggttcaggcgacccggatcgttctctggattgaggatatcgatcaggcggatcagctcttcgctgtccatgctcggaccgactttcacgccgatcgggttgcccacgccacgcaggaattccacatgggcgccgtccagctgccgcgtacggtcgccgatccacagcatgtgcgcagagcagtcgtaccagccaccgctgaggctgtcctggcgtacgaacgcctgctcgtagttcagcagcaatgcctcgtgagccgtgaaaaagttggtttcacgcaattgcggcgcgttgtccatgccacaggcacgcatgaacctcagtgcctgatcgatccgcgcgcctagttggtggtacttctcggccatctgcgaattggcgatgaagtcgaggttccattgatgcacctgatgcaggtcggcaaagccgccctgggcgaaggcgcgcagcaggttcaggctggacgtggactggtgataggcctgcagcaggcgctccgggtccggcacgcggcttttctcatcgaagccgatgccgttgacgatatcgccgcgataggcgggcagggtgacgccttcgatggtctcgttgccggaggagcgcggcttggcgaactgcccggccatgcggccgaccttgatcaccgggcagcccgcggcgaaggtcatcaccactgccatctgcaacagcaccttgaaagtgtcgcgaatcttcggtgcggagaattcggcaaagctttccgcgcaatcgcccccctgcagcaggaaggcgcggccctgggtaacctcggcgaactgccgacgcagctcccgtgcctcaccggcgaacaccaatggcggcaagctcgccagtgtctcctcgacgcgctgcagatgagtggcgtccgggtattcgggctgctgctggatgggtttggttctccagctggtggggctccaggcgttgctcatggaagtcgtgtccgtcggcgaaaaagtgcgcagattttacctgatgcgtcgccttggcgctgatagcccttgccaatcgggctggtaagatgcgccgaccggtttggagtgagcgcaatggacaagcaggaagtgttgctggccgaagtgaaggatgcgtttggcctcatccgggtcttggaggtcggcgactatcgttttctcgagttcggtgcggcggtcgagcaaagctgtgtcttcacgcgggatcccagctggctggagtacgactacacgcgcgccatgctgatgggcggtctgatgcatggcgcgccggagaccgcgctttttcttggcctgggtgccggcaccctgacccaggcgtgtctggagttcctgccgctggaggacgtcgaggccatcgaactgcgcccggacgtaccggatctggcgatgcgttacttgggtttgcagaacgattcgcggctttatatccgtattggcgatgcggtggaattgctcgattcggccgagaccgccgacctgattttcgtcgatctctataccgatgtgggcccggcggcggcacacctggcgtggcgctttctcgaacgctgccagcagaagctgaatccggacggctggctgattatcaaccagtggggcaccgatgaagacaaaccgctcggcgcggcgctgctgcgggggctgtttcatcgtcactactgggagtgcccggtgaaggagggcaatgtcgtactgttcgtgcccgccgatctcgaccaaagcctcgatgtcgccgccttgcgtgaacgcgccgcggccctggcgccacgcctgggttattcgctggattcgctgatcgatgcactacgccctgcgagttaaacgacaataatcccgcaccgacccgcttctcgtgggaggggcgccccgcggcgaatcgaaccttctgccggcaaagccaaaagcttcgccccgaggtcgggcctcccacaaagaaaacaaaagctcacccccatggcctgcaccgacccgctttagtgggagccgcgcccccgcggcgaaaacaaaacttcctgccggcgcagagcgaaaagcttcgccccgaggtcgggcctcccacaaaaacaaaagctcacagccatagcccgcacggacccgcttcttgtgggagccgcgcccccgcggcgaaaactacctgccggcgcagagcgaaaagcttcgccccgaggtcgggcctcccacaaagaaaaaaaagctcacagccatagcccgctcggacccgcttcttgtgggagccgcgcccccgcggcgaaagcaaactccctgccggcgcagagcgaaaagcttcgccccgaggtcgggcctcccacaaaaacaaaagctcacagccatggcctgcacggacccgctttagtgggagccgcgcccccgcggcgaaagcaaactccctgccagcgcagagcgaaaagcttcgccccgaggtcgggcctcccacaaaaacaaaagctcacagccatagcccgcacggacccgcctctcccccgcacggacccgcttcttgtgggagccgcgcccccgcggcgaaagcaatctcctgccggcgcagagcaaaagcttcgccccgaggtcgggcctcccacaaaaacaaaagctcacagccatggcctgcacggacccgctttagtgggagccgcgcccccgcggcgaaagcaatctcctgccggcgcagagcgaaaagcttcgccccgaggtcgggcctcccacaaagaaaaacaaaagctcacagccatagcccgcacggacccgcttttgtgggagccgcgcccccgcggcgaaagcaatctcctgccggcgcagagcgaaaagcttcgccccgaggtcgggcctcccacaaaaaacaaaagctcacagccatagcccgcacggacccgcttttgtgggaggcgcgccccgcggcgaaaacaaactccctgccggcgcagagcgaaaagcttcgccccgaggtcggggctcccgcagaaaacaaacgctcacggccatagcctgcacggacacactcccgccggccccgaacttaacctccaagacaaaatgcacgcacagcttcacagaattccggtatagtacgcgccggctgaaactcagcctgcgttaggtactgcaacacacgaagcgctgcttcggctgctgtccgcttctcgcggctgtccttgacgattcatcattcattacgttttcgcaaaccccgccgaccaggctgccagggtgaccttcgggttttgcatggcatgcgcagcttcggaacatgggtctttgcggagcatcaggaaaagacccatgacccaggaaatcggcggctttgccgcactcggtattcatccctccgtactcgctgcagtcatcgcagtcggctacgaagagccttcggcgatccagagccaggctattccggtaattctcggcggccacgacatgatcggccaggcccagaccggtaccggcaagaccgcagccttcgcgctgcccatcctttccaaaatcgacccggccaagcgtgagccgcaggcgctgatcctcgcaccgactcgtgagctggccctgcaagtcgccaccgcgttcgaaacctattcaaagcagatgcctggcgtcggtgtcgtcgccatctacggcggtgccccgatgggcccgcagctcaaggccatccgccagggcgcgcagatcatcgtcgccactcccggtcgtctggttgaccatctgagccgcaacagcgcgttgctgtcgactatccagtatctggtgctcgacgaagctgacgagatgctcaagctgggcttcatggatgatctcgaagtcatcttcgaagccatgccggaaagccgtcagagcgttctgttctccgcgaccctgccgcattccattcgcgccatcgccgagaagcacctgcgcgagccgcagcacatcaagatcgccgcgaagacccaaactgtggcccgtatcgaacaggctcacctgatggtccacgccgatcagaagatcccggccgtgctgcgtctgctcgaggtagaagacttcgacgcactgatcgccttcgtacgtaccaagcaggccacgctggatctggccgccgctctggaagccaagggctacaaggccgccgcactgaacggtgatatcgcgcagaaccaacgcgagcgcgttatcgaatccctcaaggatggtcgcctggacatcgtcgtcgccaccgacgtcgccgctcgcggcctcgacgtggcgcgcatcacccacgtgttcaacgtggacatgccctacgatcccgagtcctacgtgcaccgcatcggccgtaccggtcgtgccggtcgtgaaggtcgcgcgctgctgctggttaccccgcgcgagcgccgcatgttgcaggtcatcgagcgcgtgaccaaccagaaggttgccgaggcgcgcttgccgaacgctcagcaggtcctggatgcgcgcatcaagaagctcaccaacagccttgcgccgctggtagcggatgccgaagccagccacggcgaactgctcgacaagctggttgcagacatcggctgtacgccgcgtgccctggccgccgctctgttgcgcaaagccaccaatggccaggccctgaccttggcggaagtcgagaaagaacagccgctggtcccgaccagtggtccgcgcgagcgctccgatcgccccgagcgaagtggtgaccgcgagcgtcgcgcgccgatcccgctggccgaaggccgtgcccgctgccgcaccccgctgggcgcacgtgacggcatcgccgcgcgcaacctgctcggcgcgatcctcaacgaaggcggcctggcccgcgaagcgattggccgcatccaggtgcgtgacagcttcagcctggtcgaactgccggaagagggcctcgaacgcctgctcggcaaactcaaggacacccgcgtcggcggcaagcagctcaagctgcgccgctatcgcgaggactgatcttcaataggtgatccgaaagggtgggcttgatagcccacccttttttgtttgcccgagcgttattcgccccgaggtcggggctcccacaaaccaaactcctgtgggagccgcgaccccgcggcgaatgcagccctcagggctgccaagcaagcccagcccaccttcgcaagccccgacacaccggttcccgtgggagccgcgcccccgcggcgaatgcaggccgcaggactgccaaaaacctcaagctacaaccaagccgcatcccagtgcggatagtcaccaatccgatccaccagcccggccctcagtgggttcgcgacgacgtatcgcgctaccgactgcagatcatcctcggtgcgtagcgctcggtcatgaaacccagcctgccagatagactgcccgatctgcctggccgagatcgatttgactcgcccaacgagctgaggcagcgtgccttgctctagctggaccagccagtgaagatggtcaggcattacaacaaaggcccatgtcttgctgatgccccttgcttcatcagcttccatggtgcgaatcagtacccgtgccgcagccagatcgcgaaaaacaggccgtcggtcctgagcgacagttgtgaccaaatagatctggccctgggcagaccagcggcctttacgaagtcggctcgatcgaaataggcgtccatgctcactcatcccttgctcgttgttcctgcagcttaacgtcgatgggcgccgacgttagcgatccgttccgcaccgtggtcgatacggaaagcgcttcgccccgaggtcggggctcccacaaaccaaactaaaccaaacccctgtgggagccgcgcccccgcggcgaatgcaggccgcaggcctgccgctctaggagcttcgccccggggtcggggctcctacaaaaaagctcaccgccagcctcccgaacctgccataaaccgggtctgccgcaaaaacctgaagctcttacgcttcgccgcttcgaaaatcctgacccggacgtccaggctgttcaaaccttgaacaacatgctacaaacgatcgcaacccaaatgatctagccgcttgaaaacgaagggaaaaccatgaccaagtcggagttgatcgaacgtatcgtcacccagcaaggccttctttcgtccaaggatgtcgagctggccatcaagaccatgctcgagcaaatggctcaggcgcttgccaccggggaccgcatcgagatccggggtttcggcagtttttccctccattaccgagcaccgcgtgtaggccgtaacccgaaaaccggccaatccgtcccgctcgacggtaagttcgtcccgcatttcaagccgggcaaagagctgcgggatcgggtaaacgaagacgagtaacccgttatccagggtcatccccatactggcggtgccgacagatcaaaagctgttaaaaatcatcagctcgcctgaacttgtggtctgcgatatggactaatcccggttcgcttatttgcaatgaagcgcgtccataacaaggaattggggaagaccgtgcagcaccaaacctctacacccgaagaaatagacctggttgagctgtttcgcgcgctttggcggcagaaactgctcatcatcggcgtgacgctcatcgtcacgcttatcgctgcagcctatgcattcctcgcgacgccctattacgaaaccaagacctacctacggcccgtcccgcacagcagcctcgatcagctcaacgaaaccggcatctataagctcacccctgaggaggcgatcaatcgggtggcgagcggactttcgtcctacgacaaccggttggagttcttcctgaatcatcaggagcttttccagaacattccccagcgaggggattcgcccgaacagactttcgcggaattcaacgaaaaagcattcgaaatgttattcccggacccaaagcgcaccgataaccgcagcgcgttcgtcggcctcaagctgacctacccgcaaggcatggaaggcgcatcggtcgtgaatgatttcgttacctatgtgctggagctcgagcgtcgcgaaatcgccgatgacctcgaaagcctgatcggcaaccgcctggccagcctggaaatgaacatggaggcgcagcgcgcgagctataacgcctccaaggaagcgaagatcgcgacgctgctagaagaaagcgcacttaagcgcgcacagctcaaggatgaactcaaagctttacgcgaagagctgaaaacgcgccgaaccaaccgtatccaggagctgagcgaggccatttcgatcgccgaatcgctgggtattcgcacacccacgacgccgtcggccatggccgagacaactcgcgggggcgcgcaagtcattcgtactgaagtgaccaaccaggaaatgccgttgtatttcatgggcaccgaggcgttgatggcggagcgggatgcgctggccaatcgcaaatctgatgactttatcgagcctcgcatcgccgacatccagtctgagctggcgatgctggaaaacaatcgtgaagtcgagattctcaaagagcgggaaagcgaagatctctacctcaccaacttggccgagctgcgagaagaggccgctcgtttgaaagggatcaagctcgataccgagcggctgcgactggttcggctcgaccagccggcgttgcagtcaaccgatccggttaagccaaagaaggcgatgatcttcgcgcttggcctcgtactgggcggaatgctcggcgtatttatcgcgctgattcgcagcctggtaaatcgcagctctgacacccatccggtgtacaaataaccaaagccaatccttgggggcgctcttctgttgagagtgcccccgcggcgaatgcaggccgcaggcctgccgctcccaaaaaacttcgccccaatgcgggcctcccgtacacaccaacagcccgcacgaacccgccctgtgggagacgcgcccccgcggcgaatgcaggccgcaggccttccgctcctaaagctccgctccaaggcgggcctcctgcacatgccaacaacccgcaacccgcctttgtaggaggcgcccccgcggcgaatgcaggccgcaggcctgccgctcctaaaacttcgccccaatgcgggcttcccgcacataccaacagcccgcacgaacccgctttctgtaggaggcgcgcccccgcggcgaatgcaggccgcaggcctgccgctcccaaaaaacttcgctcctatgcgggcctcccgcacctaccaacagcccgcaagaacccgctttctgtaggaggcgcgcccccgcggcgaatgcaggccgcaggcctgccgctcctaaaactttgccccaatgcgggcctcccgcacacaccagcagcccgcacgaacccgcctcttgtaggaggcgcgcccccgcagcgaatgcaggcctcaggcctgccgctcctcaaaacttcgccccaatgcgggcctcccgcacaccccaacagcccgcaacccgcctttgtaggaggcgcgcccccgcggcgaatgcaggccgcaggcctgccgctcctaaaacttcgccccaatgcgagcctcccgcacacaccgacagcccgcaacccgcctttgtaggaggcgcgcccccgcgtcgaatgcaggccgcaggcctgccgttcttaagaacttcgcctcaatgcgggcctcccgcacctaccaacagcccgcacgaacccgctttctgtaggagacgcgcccccgcggcgaatgcaggccgcaggccgcaggcctgccgctcctaaaacttcgccccctatgcgggcttcccgcacataccaacagcccgcacgaacccgcctcttgtaggaggcgcgcccccgcagcgaatgcaggcctcaggcctgccgctcctaaaaacttcgccccaagacgggctcccgcatctacaaacaacccgcacgaacccgctttctgtaggaggcgcgcccccgcggcgaatgcaggccgcaggcctgccgctcctaaaacttcgccccaatgcgggcctcccgcacacaccaacggcctgcacgaacccgaggcgcgcccccgcggcgaatgcagctttcaagaacagccagatctagcaaggggaaccgccggtcgggtgtggcacatggcagcacgtctatcacggccgctccgcttgttttttgtgagctaggtggcaaaatggcggcccgcaaaacgtaagggaacttaccaaagtctttgcggtcgcctccccgcgctgcaccctgccgcgctgcacaccgaagaaatggaattcaaagtgaacgctgtgactactccacaagctttaacccctgttgcctctggcgaggtcgatctggtccaactcgtcagtgcgctatggaagcaaaagacgctgatcattgccgttaccgccctcgcgggcgcgatagggctggcctacgccttgttcgctactcgctattacacggttcagagcgttctacgtcctgcagcgatcaaggatctcgacgagctcaatcatctgggcgtctataagctgtcacccgagcaagcgttggcgcaggtcggagcagcactggattcctacgaaaatcgcttgagctacttccgtgacaatcaacagctcttcgccgacctggcccagcccggtcgtagcctcgagcaaacctttgatgccttcaatgacgaagctttcaagctggtgcagcccgaccccaaaaagaatgagggcaccacaccctttgtcggcatccagctgacctacccggaaggcgtcaacggcgtacaagtggtcaatggtttcgttcagtactcgctcgatagcgtacgtacgcaagtcgccgccgacctcgacaccctcattggcaaccgcctgagccagctggaaaagagcatggccgccgcccgagccaattatgaggtgagcaaagaaatcaagatcgccaagctcagcgaggctgacgcgctcaagcgcgcccagttgaacgatgagctctcagccctgcgacagcaattgaagactcgccgtgacaaccgcgtcaatcagcttaacgaagcaatccgtatcgccagttcgctcggtatcaccaagcccaccacaccgtcgtcgcttggcgcagccgaaatcaccagccagggcagcgtgattcgtaccgaggtcaacaaccagcagatcccgctctacttcatgggtagcgatgcgctggaggcggagcgcaaggcgctgcttgcccgtcgctccgacgatttcaccgagccgcgcatcgcccagatcgcgcgcgaactcaaactgctggagcacaaccgccagatcgaagtgctcaacagccgcgaaaacgaagacctcttcctcaaagaccttgccgcctggcgcgaggaggccgctcgtttgcgtgccctgcaattcgataccgaatcgctcaagctggtctccatcgaccaagctgcggttgagccgagccgaccaatcaaacccaagaaagccctcatcgttgcgctcgccctagtgcttggcggcatgctcggcttgttcatcgcactggtgcgaaacctgcgtcgtccggtcgtccggatctgaccatccatccgtcggaacgctgctggcgacccagcagctccgaaactcgttacaatccccgctttatttttttcagcgggcgcgcgactagtttgtcgcgcgcattgggtgacattgttaaaggactaaccatgagctatccacaaatagagcatcacggcgccaaggacggcgttaccggctcctgtcaccaattgcgcatgaatgccgccaccagcctgctgatcgactgcgggctgttccagggtaacgacgcatcgatccctggcgaaccgggctcggatcggctagccatcgagttcccgctggacaccatcaaagcgctggtcgttacccacgttcacatcgaccacgttgggcgcattccctacctgctcgcagcgggcttcgagggccccattctctgcagtgaaccctcagcgaaactgctgccgatcgtgcttgaggatgcgttcaagctcagctttagccgtgatcacgcgcagatcgaaaaatatatccgcctcgtcgagcaacggatcatcgctttgccgtaccagcactggttcaccctggacgatagcgacggtctgctggcccgcatacggttacagcgcgccgggcacatactcggatcggcctatgtcgaaatcgatctgagctacccgcaaacaggggagggcaagcgcgtagtcttttccggcgacctcggcgcaccgcatgcccccttcctgatgccgcccgaatccccggagcgcgccgacatcctggtaatcgaaagcacctacggcgatcgtctccacgaagaccgcagcacccgccgccagcgactcgaagccgttatcgaacaagccctggaagaccaaggcaccgtgctgatccccgcgttcagcatcggccgcacccaggaactgctctacgagcttgaggacatcattcagagcaagcaaagaacggccgcagacctgtcccatcttccctccggggagaggggaacggccaacgacgaagctccgaccacctccgatatgctccctctccccactggggagagggctggggtgaggggagcggctagccccgaagctgcgtctgactccgaccaaccccctctcccctcaggggagagggctggggtgaggggaaagggggccagcgtcaatgcggcggaaccaggcacggaaccaaactggcccgaactcccgatcatcctcgactcaccgctcgcgagccgcttcaccgaggcctatcgaaacctcaagccgtattggaaccaagaggcccgcgaacgcatccaatccgggcgccgcccgttggccttcgaacaactggtcacaatcgacagccacagcgaccaccaaagcgtcgtcaaccaccttgctcagactgcacgcccagccatcgtcattgccggtggcggcatgtgcagcggcggtcgcatcgtcaattacctcaaagccatgctcggggataaacggcataacgttttgtttgtcggctaccaggccaagggcacgcccgggcatgagatccaaacctacggaaccaagggcggctatgtatatctggacggcgaacgcattgacgtacgtgcaggcattgccagcatcggaggctactcggcgcatgcggaccagaaggggttgatagaattcgtgaccgggatgcaggcgtggccgacagagattcgggtggtgcatggggaggagggggcgaagaaggtgctgatttctcttctgcgggagtggtacaggcgcaacaagttatccgtcaatattatgatcggtgggacggtggagaaaagcgagcaggacgtttcggatgatatataaggctatgtttttgtgccgcattagtgattgtttgaccgccgaatgctctgctaatgaatgagcttatttcgaggctcatcaatgtttcgcttcggggtggaacacttgtctgtaagttcttgctgattttctttctggctaaatttctgcctccagaagaggtaggtctatttgggttggttgtcgcaagcattggttactcgttttttgtaattggtttcgagttctatacatattcgagtcgcgaattacttggcgtcgataagggaaattggttgccgataattagggaccagtgggtgttctttgcggttagttatgctttgtttttgccgctgatattttttgcctttggtatatatttctcttcttggaagtatatcggatggttcttggtgttgttgttgcttgaacatacggcgcaagagctgaatcgcttgcttgttgtgatgtctgagcagtttttagcgagcttggttttgtttttaaggagtggggcctgggctattgttgctgttttgttaatggggtacgtacaggatgcgcgtaatctagactttgtatttctgacttggtccataggcgcaggcaccgcatgcgcattgggaatggcgagggtacttcaactcgataaaagcacatggaatagaaaggttgattggcgctggattttacgcggagttaagatcgcttttccactgttgatagcaagccttgcaattcgcggcttgtttaccttcgatcgttactggatcgaaagtgctgttgggctagatgtcctaggtgcctacgttttatttgttgggattgcgttttctattgtgtcctttcttgatgcaggtgtgattgcgttcttgtaccctaaagttgttgctgccgcgaaagagaacgatgagaagaaatttaaaaagaatatgaaagagcttgctgtcacgttggtgttagctgcagtttcgatggctgcttttgcgctgttttttagtccttttgtacttggttggattggaaaggaaatttatttagataatcttcatctgctgcaatggctgcttttggctgttattgtttatgcggctagcatggctcctcatgttggcttgtatgcaaaacaccacgataaggctattttgtatagtcaaattcttgccttgctagtcttttttgtcgggtgttttataggtattcctatgtttggtgcgattgctgtggtatgggcaatgtgcgtgtcgttttttgtgatacttgtttggaaaattgctgtgtatcagaaggtatgcggattttctagtgtttcagaataggaggttggcttatgagtaaagtgctggttactggggcggatggttttattggttcgcatcttacagagttacttgtgcgcgaagggtatcaagtcaaggctctatctcaatataactcttttaactattggggttggcttgaagatattgactgtctcgccgatgttgaggtagtgaatggtgatgtgcgagacccgcattactgcaagcacatcacaaaagacgttgatgctgtatttcacttggctgcgttgattgcaataccctattcatatgtggcgcctgatagctatgttgatactaacgtaaaaggtacattgaatatttgtcaggcggctttagaaaatgacgtgcagcgtgttattcatacttctactagcgaagtttatggtacggcacagtatgttccaatagatgaaaaacatccgttgcaagcccaatcgccttatagtgcctctaagattggcgctgactctatggcgatgagcttctttaatgcgtttgatttgccgttaactatcgcgaggccttttaatacttacggtccgcggcaatcggcgagggcagtgataccaactatcatcactcaaatcgctagcggaaaaaaggagatcaagttgggcgatgtgtctcctacccgcgatttcaattacgttgctgacacctgtcgcggctttttggagttggctcgctgcgataaggccatcggggaaactgttaacattggctccaactatgagatctcggtaggagatactcttaatctgatccgtgagctcatgggaagtgatgttgaatttttgactgatgatcagcgcattcgcccggaaaaatcggaggttttccgtctctggtgcgacaataccaagataaacggacttactggcttcactccgaattactctataaagcaggggttgcaggagaccattgattggttgtcccggccagagaatttggctaaatataaagccgacatctacaacgtctgagatcaagtcatgttcgactcccttattaaatttgtgcgggatcaataccaaacaaatgatttcatcccacttcatgcccctgttttctccgggcacgagcgtgattatgtggtggaaaccattgagtcgacttttgtctcgagcgtgggtgctttcgtcgaccgctttgagcgggatatggctgcgtacaccggtagccaaaaagcggtcgcgacggttaacggtactgccgccttgcatgccgctctgatacttgctggagtccagcctggcgatctagttttaacccagccgttgacctttgtagcaacgtgcaatgctattgcatattgcggcgctgctccggtctttatcgatgttgatcaacataccctcggcctttctcctacagcacttgagaagtggctggaggaatacgcatatatggacttggacggtatatgcaggcttaaactagatgagagagtgctgagggcctgcttgcccatgcataccttcggacatccagtcgagctagaatatcttgttgctgtatgtaagcgctggaacttggttcttatcgaagatgccgccgagtcgctaggaagtatttacaaaggccgacacacgggcacgttcggtcgtttaggtatcttgagttttaatgggaataaggttatcaccaccggtggtggaggtatgatcttggctgatgaagagttgggcacgcgcgctaagcatctaacaactacagccaagaagccacacccatatgaatatgtccatgatgaagttggatataattatcgtctacctaatataaatgcggcgctcgggtgtgcgcagctggagcaattggaggacttcatcgcttgcaagcgagagctggcaaaccgctatgcagaggtactagaagggagcgaactgcagttctttaaagagcccgaaggctgtcgctccaattactggctcaacgctgttatttgcgaaagccctgcacgacgcgacgtgctattaaagtctaccaatgacagcggtgtgatgacgcggccgatttggaagttgatgaaccgtctgcctctgtacgttaactgcctgcgaggcgacttgacgaatgctgaatggctggaggctcgagttgtcaacgtaccaagcagcgtcctgccggggtggaaggtgtgaaaagcaaggtcgcagtcttcaccggtacgagagccgagtacggcttgctctattggttgatgaaggatattcaggctagtgctcagctggagttgcaggtcatcgtaagtggcatgcacctttcgccagaatttggtgaaacctggagacagatcgagcaggacggtttcagcgtcgattccaaggtagaaatgctcctgtcttcagatacgtcggttggagtagtcaagtccataggactgggaactttaggattcgcggatgccctggatcgcttacggccggatatgttggtagtgcttggtgaccgcttcgaggctttggcgattgctcaggccgctctgatcatgcggattcctatcgtgcatttgcacggtggtgaaattactgaaggggcttacgacgatgcaattcggcatgccatcaccaaaatggctcacttgcattttgtcgcagcggaaccatatcggcgtcgtgtcatccagatgggcgagtcgcctgaacgagttttcaacgtcggtgcggttggcctcgaccatttgcgtcgcagcccgaaaatgaccatcgaagagctcggtaaaagccttggctttgcgctccgctcgccttacctgttggtgacctatcatccggtcactctatcggacgagaacccggagcaaagcttcactgcgcttttgcaggcgctggataaatttccagatcaccagatcattctgacttatccaaacgcagacaacggtggcagagccatcattccattacttgaagcttatgcgcagaaccagcctgagcgggtgttggcgatcccttcgctcgggttcaaacgctatctgagtgccgtcgctatgtcggctgctgtggtggggaattcctccagcggaatcattgaggttcctgctttcggtattcctaccgtaaacatcggtgcgcgccagaaaggtcgtttggccgcgaattctgtgctgcattgtgagccgaatgccaaggccgttgaggttgcacttcagcgagcgctttcccacgaattcgccgaagccagcaagaacactgtcaatccttacggccaaggcgatgcagccaaagccatcgtggatgtccttgagcgtttcgacgggacatttaataagtcattccacaatctgagttgacccatgaagcagtccgacaaagatgcggtttacatcatcgccgaagcaggcgtaaaccataatggtgagcgtgagctggctttcgctctagtggacgccgcagcggcggctggtgtcgatgcagtcaagtttcaaaccttcaatgcggtacgtctggcctcgaagaccgcgcctaaggctgcttaccagaaacagagcacggatgagtctgaaagccagctggtaatgctcaagaagttggagttaccccaagcctggcatgctgatctgcagcgctatgctcaccaaaaaggcatcgagttcctttccactgcattcgatccggatagtttgatctttctatccgagctgggcatgccgttgttcaaggtcccgtcaggcgagctgaccaacggcccgcttttatggcagttcgcacgaactggaaagaggttgatcctatccacgggcatggcgacactcgctgaggtagagcagggccttgccatcgtcgcgcatgcgctggcatccagccgggagcctgcggacatgaatgaagtctggcgtagctggagttgccgcgacgcgcggcaacggctgcaggggcatgtgacgttgcttcactgtacctctcaataccccaccccttggaacgaagttaatctcaaggccatggacacactggcccatgcctttggccttgatgtcggttattcggatcatacagaaggctgcctgattccggttgccgcggtggctcgcggggccaaagtcattgaaaaacacttcacgcttgaccgctcgctgccgggacctgaccacaaagcttcgctggagccggatgagctcaaacgaatggtttccgatattcgctccctcgaactggcgctaggtgacacttgcaaggctccgcaggctagcgaatgggacactcgccaggcggcacatcagcaagtggttgccgctcgggagatagccgcaggtacagtattttcccgggaggacctaactactgcgcgcagcgggcaaggcttgcctcctactgctctgtgggggttggttgggcgacgttcggcccgtacttatcaggtcggtgagattatcgagccatgaaagcgatagctaatggcagcttacctttgataatgctcggtgcaggtggccatgcgaaggtactgctttcattagcccaagcgtccggactgaatgtgctcggagtctgtgatccagaactagcccagcaagggagagatcagtggcgaggcgttagggtattgggcagcgatgacgcgcttggtgcatttgatccagcgtctgttgggctgatcaatggcattggacaattggtcggaagcacagggcgccgcaaggtctttgagcggttaaaagctaaaggctttcgctttccagtgctagtgcatccggccgcctgggttgacgacagcgccgtgctgaacgaaggcgtgcaggtcatggcgggcgccgtgatccaggccgacgcgacagttggttgtaattcgatcatcaatacaggagccagcctggatcatgactgttacttgggtgtacatgtacatgtcgccccaggcgccactctttgtgggaatgtccgggttcaagatcgcgccttcattgctagcggcgcgactgtgatccaagggcttacggttggagaggaatccgtcgttggggccggggccgtgttggtccgcgacctcgccgctcggctgacattaataggccctgcggcgcgaaacaaagcagcgctcggtgagtagataacgaaggttttttagaaatgaagcaatgggaatccacactcatcggtccggaagctactctggaagaggctatcgcgacgcttgaccgcgaagcattgcgtatcgtcatggtggtcagtgctgagcgccgcctgctcggcaccttgactgacggtgatgttcgccgtgccttgttgaagcacatgaccctcgatgttccagttgccgaagtcatgtgtatcactcctcgtacggccgctagggattggagtaaggagcggatcctagcagacatggagaagtaccaattgctccagttgcctgtagttgaccaagaaggtcgtgtcattggcttggaaaccttgcatgatctcctgaacaagcgacatcgcgataacccggtatttctcatggccggtggttttggaacacgtctacagccactgacccataactgcccgaaaccactgcttaaagtcggggaaaaacctattctcgagttgattcttgagaattttgtcgatgcaggattccatcgcttcttcatatcaacccactacatgccagaaatgatccgtgagcatttcggtgatggtagccaatggggcgtcagtatccgctatatacatgaggaggaaccattgggcacaggcggtgccttgggtctattgcctcacgatgaaatcgaccagcccctgttcatgatgaatggtgatttgctgaccaccctgaatttccaaaacctgctggagtttcatcaggaccacagcggcgtagctaccatgtgcgttcgcgagtatgagcactgtgtgccgtatggggttattcaaagtgaaggtcatcgcatctgctcgatggtagaaaaacctgtacatcgcttcttcatcaatgcaggtatctacctcctttcacctgatttggttaaaagcgtcgcgccaggagttcgggtcgatatgccaaccctcctggagcgggaaattgccgacggcaatgacgtgaacatgtttcccgtgcatgaatactggctggatattgggcggatggaagatttcaaacgggctcagcaagagttcggcagcctatgagcgaccagcagctgtatctggtagttggcagcggtagcatcgcgcgtcgtcatattgcgaatatcaaggcgttattcagccaagcaaaagtcgggtgcgtgtctgcgtcgggccgggcgctaagcctggaagaagtcggtgccgatatcgtctacacaagtctcgaggaagccctgaatgccgagcctttgctggccctcgtcgcttcacctgcgccttttcatgtggatcaagccgcagccttattgcgagccggtattccggttctgattgaaaaacctttgtcggattcgctggagactttcgcgagagcaggcgaagttctgcttgcaaatagcaataagattgaagttgcttacaatctgcgctttatgccatcggccatacggctcaaagaactgctgactgaacagatagtagggcgcatccacagtctatcgattgaggtcggtcaatatctacctgactggcgcccggcaaccgattaccgagaaaacgtttctgctcgcaaggagctaggtggcggtgttctacttgagcttagtcatgagctagattatctgacttggctatttggatcattcgattcagtctattgcgtagcttctaactctggggctcttgatatcgatgtggaagatagcgctcacgcaattttaagtcgtaaggatggtgttgttgctagtgttcatctggattttttgcagcgggctccgacccgtatttgcaaaattgtaggggagtcaggcacgctggtttgggatcttctgcacaatagtatttgccttggtactgccagtgatagcgaagatataattttcagcgatccgagttacaatcgaaatgacatgtacctagaagagatttctcatttcgtgaaagtggctgcgggtgaactcacacccaaagttagcatctaccaagccttggataccttgcgtttgatagaagccctaagacattcgtcgatcactcggcaagtagtggatatcggagatttcgcatcatgagcgtatacgcgttcatctttgctcgtggtggttcaaaaggattacctgggaaaaatatcaagcccttgggaggcatcccgcttataggtcattccataaatttggcgcataaactaagcgacgttaaaaagattattgtatctaccgattcggacgaaatcgcggccgtagctgaaagtctctcggtagaagtaattaaaaggccggatgagcttgctagcgacactgcctcggaatggttggcttggcaacacgctatccattatctccacgcacgcggcgagtcattcgaagtattcctgagtctgccgacaaccagtcctttgcgaggaaggactgatgtcgagcagtgtcttgccgcgcttgatgaacgcacggacatggtcgtcaccgtgacgccagctgctcgcagcccgtatttcaatatggttgttcgtggtgaagatggttatagcgaagtagtcatacatgacgacaccatccggcgccggcaagatgcaccgactacctacgatatgactacggtggcttacgtctcgcgtcccgaattcatcttgaaaaattctggtgtatttgccggcaaggtcaaatcagtgatcgttccaaaagagcgggcgatcgacattgatgatggatttgatttcatggttgcggaagctctgtacaggagatgtcagcagtgaacttgaatggtaagacttttatagtagtaggggccgccggacggttaggtaaggcgatggttgatgccgccctcgattgcggagcaaatattgttgccgtcgaccagagtaaaaaggcgctacaggagattaaggtaaagcaaagcgataataagaatttttttgcagtcgaaggcgacatcacgcaagcgagttctatccagcgagtaattgagaccgcggtggaaaattttggctcgctggacggggctgtcaatacggcgtacccacgtaatgaaaactacggtagaagcttttttgacgtgacgtacgaagatttttgcgaaaacctttctcagcatctgggggggtattttttgttcatgcagcagtgcgctaagtatgcaatggtaaacaaggtaagtttctcgcttgtcaatatgtcttcgatttacggagtgatggcacctcgctttgaagtttatgccggtactcctatgactatgcctgtcgaatacgcggcgataaagtctgctttgcagcatttgggcagctatgtctcggcctatacgaaaggttcgaagttcagggttaactgtgttagtcctggtggaattctggcagggcaggaccaagcctttctggatcgttataatagttactgtcgcgacaaagggatgcttgagccaaatgacattattggggcgattctatttttgctctctgatgcctcagaatatgtgtgcggacagaatattattgttgatgacgctttttcaaattgatgaaaagagcatctatttatgtatagagtaattcatcctaaagctcgaagagtgctttttgttttcttgctttctcatttgcttgcctatacttccttgttgattgttcctgcgcattctgttacgccaaacattgaattcatattcttattgaactccagttttgttgcgcttgtcatcgtcttttcggtgttaatttataagctgttgtcactttcaaaaaaaacaggctcaagctacgggatggctatttctcagctaaggttcaatgtacttttttcttcgttttgcgggctacttgggcttgcattaatatcctacgacagaatttttctgagaggtatagattactctgcaggacttaggctggctcggtatcaatggctatcatctgaaggcggctcgttggcgagtgtggttggaaatctattaatcccatattcatatgtatgcatattttttttagtggtttattactcggccgtttctcgtattggcaggttcttactagggctttcagcttttttaggaatttttgggcatgcagccctaaatggggggaggagtaatatactccttgctctcattatagtgctatgtgcgtttgcaataagggtaaacaaaacacgtgacggttttaaactttcttcttgttgtaaatttttgcctgtcgtggtggcagccatcttgtatgttggggcgatcatcaagtcgagcgcttctatggggggagtagacgtcgaaacattagctgctttaggtgtggatagtttgtatggggaagttggcgattattttcatgacctctccggggttggagaatatctgtatttgataatatatggtatttcctatttatatcatggccaatggaccgcacaggtcgcttactcgctgccgcataaggaaggaagttatacgctatatccgttcagcgtcgtgctaagcaggcttgggcttattgacgagccgcttgctactggttatttttcggagactggtgcgtttatatctttgcctggtgctttttattacgacttcgggttcctcggtgtgattttgttatctagcttactaggtgttgcgcttggggttgtgctgaatattatcgcaggtgaaaaagacatgggtggcttaaagttggcctttgttttatatgttttgtctatggtttttttgtcccctgtattacctgcgtatggcctatcatatttgaatttcattcttctttcgtttgtttctcttggggcgttgaactcaatattatatcgtaggggtttcagcagatttgctaccccgatgtagttaggtttatataattccttaggatttaatatggattttttgattgtttacgagcgtaaaagtcgagagcttgagaatgctgtattactcaagctagagctagaaaggcgtgggtatagctgtaacatatgccagtactacgatgctcgctgttttaatatgtttggttttggtaagcctaaagttttgatcgtatctcatctttatgacaccgcgagcgtagcgagaaacctctcaagatttggctctgtttctcatttggttaacctgcaatatgagcaggttttgtccgaaaagtgggagaaattgggtcatcataatcctaagggggaggctataaagggcttccatgtttgctggggaactgcgaccgtcaatcggttaattagcgctggggtgcccaaaaaaaatgtaaaactgttgggtgctttgcagctcgatctacttaggcctgagtatcgacaaggaaaaagcgccatccgaaatgatcttagcgaaagatttaatctggatccttgtaaacgctggactttatttctctcaagttttacgtatgctgatattgcgaaggagcggcttcgcatgaatgaatcagttgctggaacaaacctagagagttttgttgggttgcatacggcgtcccgcgataaaattctagaatggtttgaaaatatattacgacaggatcgcgataattatattatttatcgcccgcacccggatgagttaaatctagataaggttttgagtttggagtgcaaatatccaaactttaaaataattaaccatcgctctgctaaagtgtggattggtagttcggataacgtatattcctggtactctacgacagttgttgaatctcattttttagataggccctattcgatacttagaccatttaatctgccagacgactttgatagtgttcttttgaagcacgctacttttgtgactagctatacggaattcgagcttgattactttaagcgtgatatggaacgtagttttccgattgatgagtatcatatggctcggtattattccgtgagccaatacaatccttcttttatggcgtattgcgatttcttagaaggcctgtctgggactgcagaaaatcagagctttaatatcaagaagtttgattatttaatcgctagttttaagactttaacggtttttattatttataatctttatcggttgtgtcgcttatttggttttaatcttgaaaagcgccggaagaagactcgtaataattttcttgtccgttggtttattgaaatggcaaatcagattgcccagcttgatgaagagaaggaaattgcgactatcttgaccgccatcgttttcgataaaacggctcctgctggtactagtgaaaaagatattattagggaaatgtgattggctctttagggttggtgccgatgttgtttgatattatataagattgtcaggctgtgctaagggctggcattgtaatatgtatttttgagcttttttattgtctagatattctgcaggttttcatatgctttctaataaaattttgcttatcactggcgggaccggctcttttggctccgccgttctcaagagatttgtagacacaaatattgcagaaatccgtatctttagtcgcgacgagaagaaacaggatgatatgcgcaagctctattcaagctcgagacttaaattttaccttggcgatgtacgggactatcaaagcattctgaacgcttcgcgcggggtggattacatcttccatgcggctgctctcaaacaagtgccgtcctgtgagtttcatccaatggaggctgtaaaaactaatgtgctcggtactgaaaatgttttggaagcagcaatccaaaatcaggttaagcgtgttgtgtgtctgagtaccgataaagccgtgtacccgatcaatgcgatgggtatttctaaagctatgatggaaaaagtaatggtggcgaagtcgcgtaatttagacgatgccaggacggtcatctgcggaactcgttatggaaacgttatggcttcgcgtggttcggttattccactattcatagagcagattcgagctggcaaaccgattacgattaccgatcccaacatgacccgtttcatgatgaccctagccgatgcggtagaccttgtgctttatgcctttgaacatggaagcaacggagatctgttcgttcagaaagcgccagcagcaaccgttgaaacattggcgcgagccttaaccgttctagttgggaaacccgaacatccgatccaggtgatcggtacccgccacggtgaaaagctttacgaagccttgcttagtcgtgaagaaatggcttgcgcagaagacatgggggagtatttccgtgttccgccggatttacgtgaccttaactacgcgaagttcgtggagcagggcgaaacgaagatttccgagaccaaagattacaattcgcacaacaccgaacgactggatgttgctggtatgcagcgtctactgctaaagctagatttcatgcgggctattcaccgtggtgagcacgcagcggccgaggaataagcaatgaaagtgctaatcactggtgccgatggttttgttggtaaaaatctcgttgcgcacttaagtgagcgaaaaggcatcgaagtactgagctttgttcgtggagacgatgcgattcgattgcctgctttggtggtcgaagtggattttatttttcacttggccggagtgaaccgcccgaagaattcccaagagttttacagtggaaacactgacttgaccaaggcgctgtgtgaggcggtaaaggcgagcggcaagcctgtgcccgtgttgtatacgtcatctactcaagccgagcagaacaatccttacggcatcagtaagcgtgatgctgaggaggcattatgcaaattggccaaccagcatggctccgcaatccatctgtttcgtttgcctaatgtattcggcaaatgggcccggccaaattacaattctgccatagctacattttgccacaatattgcccgagatctgccaatacagatcgatgatcctgcggcgcgtatcaacctagtatacattgatgatgtgatccggtatttcattgatatcatggatggcaatttggctggcgcacctttcgtcaatgtccagccacagtacaacatttcggtcggtgagctggctgagcagttgtatacatttcgtaatagccgtaactctctagttaccgatgcggttggtgttggactggtcagagcattgtactccacctatctgagctatctgccgcccgagcagttcgcctataaagtgccaagatacagcgatacgcgtggcgtgttcgtggaaatgctcaagaccaaggattcagggcaattctcgtttttcaccgcgcatcctggcgtaactcgcggtggccattaccaccattccaaaacggaaaaatttcttgttattaaggggacggcctgcttccgctttcggcatatcgtctcgggcaacttctacgaactatataccgagggagagttgccagagatagtcgaaaccgtaccaggctgggtacatgacattaccaacgttggggacgacgagttggttgtgatgttgtgggccaatgaggttttcgatcgcgaaaacccggatacctacgctcgcacagtcggtactgaagcctgaattgcggaatgcagggagaattgacaatgaagaaaatgaaagtcgtaacggtagtaggaacccggcctgagattatccgcctttctcgagtcatgaccaagttggatgagcattgcgatcatgtacttgtgcataccggtcagaactatgactacgaattgaacgagatattcttccaagacctcggcatccgcaaaccagattattttctgaacgccgcaggcgccagcggtgcagaaactataggcaacgtgatcatctcggtggatcgggtgttgggcgaggtgcagccggaagcattgctggtgttgggagatactaatagttgcatggcggtaattccggccaagcgtcgcaagattccgacgtttcatatggaagcagggaatcgttgcttcgacatgcgtgtgccggaagaaattaatcggcgtatcgttgaccacacttctgatatcaatctaacttacagcactattgcgcgcgactatcttctgcgcgaagggttgccgccagatatggttatcaagacgggtagcccgatgttcgaggtgctcaattattaccgcgaaggtatcggcgcgtccgacgtactggggcgtctcgggctggaagccggcaagtttttcgtggtcagcgctcaccgcgaggagaacgtcgactcggacaaaaacttcctcaagctggttaatttgctaaacactgtcgcggcgcattatggcttgccgatagtcgtctctacacatccgcgcacccagaaacgtgtggacatcatgggtgttcagttccacaaaaatgtacgtctgctcaagccgctgggcttcaaggactacaacaagctgcagctcactgccaaggcagttttgtctgatagtggcacaattaacgaggaatcatcgattcttaacttcccagcgctgaatatacgcgaagcgcatgagcgcccagaaggcatggaggagaccgcagcgatgatggtaggtctggaggccgagcgtgtgatgcaggcgttgcagattgtagagaaacaggctcgtggcgacgagcgtagtatgcgtctggtaggtgactacagtatgcctaacgtggcggacaaggttgttagaatcattcatagctatcgtgactatgtgatgcgcactgtctggaaaagatactgatatcgggtgctggcgacgccaatatgacaagaatatttgtagtatctgaatatgtctatgccgcacagaattcgactggttatttttggtcgaaactgattgataaaattggaacaaatttttgtaacataaacgtcgtcgcacctatccccggtgagcgaggttgcataaaaagcgaaatttcaagtgtgcgctatattgaatttccctccaggatattcaataaaaataagctggcttctcgcctgattggccagatataccaatgtatttggttttcttaccatctgcttcgtcacgctcgacgtgaagacgttgttctgtcaggaacgaatcccgccctcttgcttgttctcatgcctgtaataaagttttttatgggtttccgttggtgcttattagttcatgatgtgtttccggagaatcttgtaccagcgggggttctcagagaaaaaagtatcccatatcgattattcagaaatttttttaactgggtctattcgtgtgctgatcatcttgtagtaatcggcagggatatggaagaactcattgtcgaaaaaactgggaacgacgctaatattacggttattcagaattgggtgagtgatcgggatgttattcctgaagatcgaaagacttcagaagttattgggcgattgggttggcgagataaaacggtgtttcagtttttcggaaacatcggtcgcgttcagggtgtcgataatctgctggcagccatagatttggtaaaaagtacgaaggcggcttttctctttattggtgatggtggttcggcaaggatggtcgatgagtacgcaaataataaaaagaataaaaatgtcgcttatcttggtcctcttgaacaaagtaaaaaaagtttgggcctggctgcctgcgatgttgcgcttattacgctagaaaaagggatgttggggcttggggttcctagcaaggcatacttttccatggcggccgacaaaccactactcgctgttatggatgatagagctgaaatttgccgaatgatcgctgaggaaggtatcggctggtattgtgagcctaacaacccggctgcgctggctgcgcttattgataatatctgccaatcagacatcactaacttgcaaggccttcctcgtagggttctgcagcaaaaatattctgaacatgccgcgctagataagttcgttgcatgtataaagtcagttatggccaagaaataatgagagtaatgctaacaggcgcgaatgggttccttggcaggaatattctagacgtgttgcaacatcggggtttagaggtgcgtgcatgtgctcgtaatgcagatatctccaagcctgactgggctatatcacctgatttggcgccacctgccgactggggcgtacttctcaacggagtccatatagtcgttcatgcggctgctcgcgctcacctaaagaaggatgaagtggatgacccgttaggtgagtatcgtcgtgtcaatgttgagggcacgataaacattgcgcgtcaggctgctgctggtggcgtgaaacgttttgttttcattagctcgattggcgtaaacggcaatatcacttcccgtccgtttgaagcagagcatcagccgagccctgcagagccttatgcacagtccaaatgggaagcagagcaaggtctgatgcaactggctgccgaaacaggtttggaggtagtgattatacgtccaccattgatctatggccctggcgcaccaggcaacttcggcagtttggttcgttggattggaaggggtgttcccttgccccttggcgctatccagaacaaacgttcgtttatcggtataggcaatttggttgatttgatcatccgttgcatcgaccatcccgccgccgccaatcaggtgtttctcgcttgcgatggcgaagatctttccaccactgagttgttgcgcggcgtgggcgaggcgatgggcaagcccgcgcggctgattcccgtgccggctggcatccttcaatttggcgcgaccgtgctgggcaaaaaagcgatggctcaacggttgctcggttcattgcaggtcgatatcagcaagacctgcgaactgctggactggaaaccaccctatacggtgcaagaagggcttaggcgctgcttcgagcgctccaattgatctattaccggatgaacccgtgattcgagtttttgattttttattttcgctggtgggcttggtggttggcttccctgtgttgctcgtgctgacgcttatcggcctgttcgatacgggctcaccgatttttcggcaagtgcgtgtcgggcgccatcagcatccgtttacgctggtcaagttccgcaccatgaaggtggacactgcgtcagtcgccacgcacctggccagtagtgcgtctatcacccgctttggccattttctgcgaaagaccaaactggacgagttgccacaattgtggaacgtgctgaagggcgatatgagtctcgtagggcctcgcccgggcctgtttaaccaggaagagctgactgcggagcgcgccaagcgtggtgtgttcgatgtgcggccagggatcaccgggctggcgcaggtgagcgaaatcgatatgtccacgccggctttgttggcggagacggatcagaagatgatacgcagcctgacgctggttgattacttcaagtacatcttcatgaccgtagcgggcaagggtgctggggaccgggtcgtgaagcgctgatctcagcatattctcaaactgtgttgtctagcgttcgatcgattggataaatggactggtaaccgaagcggccggcactccggctctgggaggggtagctttgtgttgagattggctgaaaacttacgtacgcggctggtgcgattgcccaggcgctacaagcgtttgattcaagtatcgaccgatgtagtgttggtctgggctgcgctttggctcgcgttttttgtgcgtcttggtgacgctaattttgtcgagccgctcggtgggcatgcctggctgttcgcagtagcaccgctggttgccgttccgctctttattcggctcggcatgtatcgcgccgtgatgcgctatttcggcaatgacgcgctgatggcaattgccaaggccgtgacgctctctgcgctgttgctttccctggcggtgtactggcgcaccgatgcgcccaagctgattccgcgctcgatggtgttcaactattggtggctgagcctggtgctaatcggtgggctgcggctggtgatgcgccagtatttcatgggggactggttttcccctgactcgctcaccaagttcaagggccgtgatgcgagcttgccgaaggtggccgtctacggggctggtgcagcaggtaaccagcttgtggcggcgctgcggctgggacgaggcatgcgtccggttgcgttcatcgatgacgatcccaatctgttcaatcgctccatctcgggcttgcgggtgtattcgcccaaacatatccagcagatgatcgaagagacgggcagcgacgagattctgctggccatcccttcggcctcgcgggcgcggcggcgtgaagtgttggagatgctcgagcactacccgctgcacgtgcgcagcgtgccgggcttcatggatctggccagcggcaaggtcaaggtcgaggacatccaggaagtcgatatcgccgacctgctcgggcgcgacgcggtgccgccgcaacaggcgctattcgagcggtgcattcgtcgcaaggtggtcatggtgaccggcgctggtggctcgattggttcggagctgtgccggcagatcatttccaacaagcccaaggcgctgctgttgttcgagcacagtgagttcaacctgtacagcattcacatcgaattggagcgggcgatagagcgcgcttcgctgccgatcaagctggtgccaatcctgggttcgattcgtaatccggatcgtctgttggatgtgatgcgtacttggcaggtggagacgatctaccacgcggcggcctataagcatgtgccgatggtggagcacaacgtcgccgaaggcgttttgaacaacgtgctgggcaccatgaatacggctcaggccgctgtgcaggccggcgtagccaacttcgtgctgatttctaccgacaaggcggtgcggcccaccaacgtgatgggcagtaccaagcgcgtcgcggagatgatcttgcaggcgctgagccgcgagacggcaccggtactgttcaatgcggacggggcggtgcatcacgtaaacaagacccggttcaccatggtgcgtttcggtaatgtactgggttcttcggggtcggtgattccccggttctatcagcagattcgcagcggtggtccggtgaccgtgacccacccgaagatcacgcgctatttcatgaccattcccgaggcggcgcagttggtgatccaggccggctcgatggggcagggtggcgatgtcttcgtactggatatgggccagccggtgcgcattgctgaactggctgaaaagctgatccacctgtctggcctgagcgtgcgctcggagaagtgcccgcacggggacatcgcggtggagttcaccggcttgcggcccggtgagaagctgtatgaagagctgctgatcggcgacaacgtcagccccaccgagcacccgatgatcatgcgcgccgacgaggagtatttcacctgggacgtgttgcggggggtattggcaaagctgctcaaggcggtggagcaggacgattatccgcaggttcgggtattgctgcgcgaagtggtgagcgggtatgtgccggaaggtgagattgtggacttgatctaccagcagcggcgggttgggccgactgagtagtacgattggcgggctgtcgcccgcactcgccgcgagggcgcgcctcccacataaaagcaggtcagtgcgggcggtgggcgctttggttggcttttgagcttttgattctgtgggaggcccgaccccgaggcgaagcgtttggctcttgggtgggcaggaggtgctcattcgccgcgggggcgcggctcccacaaaaaagcaggtcatcgcgggcggtgtgcgctttggtttgcttttgagcttttgattctgtgggaggcccgaccccggggcgaagcttttgcctcttggctgggtaggaaggccgcattcgccgcgagggcgcggctcccacaaaaaagcaggtcgctgcgggcggtgggcgctttggtttgcttttgagcttttgattctgtgggaggcccgaccccgggggaagcgtttggctcttgggtgggcaggaggtgctcattcgccgcgggggcgcggctcccacaaaaaaagcaggtcactgcgggcggtgggcgctttggtttgcttttgagcttttgattctgtgggaggcccgaccccggggggaagcgtttggttcttggctgggtaggaagcccgcattcgccgcgagggcgcgcctcccacataaaagcaggtcagtgcgggcggtgggcgctttggttggcttttgagcttttgattctgtgggaggcccgaccccgaggcgaagcgtttggctcttgggtggtcattcgccgcgggggcgcggctcccacaaaaaagcaggtcatcgcgggcggtgggcgctttggtttgcttttgagcttttgattctgtgggaggcccgaccccggggcgaagcttttggctcttggctgggtaggatgcccgcattcaccgcgaaagcgcggctcctacaatgggctcgcggtgggctgatctggctttagacccgacctcggggcaaggctttggtttgttggggctgtggtccggattcgctgcgggacaggtttccaacagcgatcctcaggcggaagcgctggttcgagggaatgccctaatccgttgccttatagaactgtttaccaactcgagtgatgtggtcgatcagccgagaattgtcgatttggcagtgcagggataggttcaccttgtaaggcaggagcaggtcatcgatcgcgagctcgatatcgagtaggtcttggtgtgagagcccatcacccttgagggtcaagtcgatatccgaaccggggcggtaggttccttttgcgcgagagccgtagagaatcgcttcgctgaatttgggaaaccgtcgtagctcttcttgaatcgattggatatcgctttgagagagccccgtgtcttctaaaatcatggggctggctcggctcggctacgcatggttcgctctagcgcttttagcagcgaatggtgcttcattcggatattgctcaagatggcttcggccgtttcctcgttatacgtgtgagaggtccggttacggtctgtcagcatgtgcatccagccgtgaccatcttcgatcagccccttgctaaacgcttctcttatggtgtcacgcgagccgacaatgccgtcgattccttgccagacgaggaagtctttcagcgtattccagccaagctcgtagcagcattcgaagccgtggatgacgccctgtttttccagcttggataggtcgcgctgctgcatcagttccactgcatcatcgagctgccgcagagcgctaccaaagttatgcaggcgtggctgccagcgcacatcgaggttcattcgtaagccctgatacgtttgcgcatatgctacgacttcatcgtggatcggcctatttatttggttcgtccatccacttcggtttcggatagcggcggtcggctttaccggcgttgagcacagcccctggaacgtcatggccgaccagctccggcaggctggcggcgcattgcagtagccggtccagatcgacaccagtatccaggcccatgcgctggaacatgtgcaccagatcctcggtacaaatgttgccgctggcgccgggtgcgtatgggcagccgccgaggccgccgagcgaggcgtcgaaacggtcgataccggcgttcaacgcggccagcgcgttggccaagcccatgccacgagtgttgtgaaagtgcgcggtgaataccgcgtcgggccattgggtaactgcgtggcggcagaggcgttcgacctgcgcggggtcggccatgccggtggtgtcgcaaagggtgatgccctgcacgccgatgtccagcaggcgctggatgagttcacgaacgcgcgtctcaggtactccgccttcgaatgggcagccgaacgtcgtcgacagcgaggcgttgatgaatacgccgctgccgcgcgtcacctcgatgatgtcgcggaactgagccagcgattgctccggcgtcatccgcagattggccatgccgtgtgtgtcgctggcggacatcaccagattgatttcgtctacctcgcaggcaagggcgcgctcgcagcccctgacattgggtaccagcacggtgtattcgacacccggagcccgccgtatgccgcgcatcacgtcttctgcgtcgcgcaggttgggtatggccttgggcgaggtgaaggaggtgacctcgatcttggccagcccggtttcggagaggcgatcgatcagcgcgatcttgtcttcggtgggaatgaagttgggctcgatctggaaaccatcgcgggtggcgacgtcctggatgtacagacgttttgtcatggtgatctccgttgggtgccaggcgcggcgttgtggttcagggcgttggtagtggtggaacgtttggcgctggtaaaaatcagtgttctgcctgtttaaaagcaaaagcttcgccccggggtcggggctcccacagaaggtcaaagagccttgctctgggtggatcttctacagcgggcgacatccgtgccgcttttgtttttgtgggaggcgcgacctcgcggcgaaggcgagctttcttgcccgctcaaaagcaaaagcttcgccccgggggcggggctcccacaagaaggtccaaagccttgcttgggggcggatctcctacagcgggcgacatccgtgctgctttcttttttgtgggaggcgcgcccccgcggcgaaggcgagctttctgctcgctcaaaagcaaaagcttcgccccgggggcggggctcccacagaaggtccaaagccttgcttgggggcggatctgctacagcgggcggcatccgtgccgcttttgtttttgtgggaggcgcgacctcgcggcgaaggcgagctttctgcccgctcaagagcaaagcttcgccccgggggcggggctcccacagaaggtccaaaaccttgctttgggtgatgctgcaaggtttgggctccatagaggagccaaagcactcgtcgcactgcttttgtgggaggcgcgcccccgcggcgaaggcgagctttctgcccgctcgagagcaaagcttcgccccgggggcggggctcccacaaaaagcagaaagctctgtgcaccgcgggcgttcagatgactcctctttcgcgcagcccttggcgttgttcgtcggtcaggccgaggcccgccaggatgtcttcggtgtgctcgcccagttgcgggccgccggcgccgatacggccgggtgtgcggctgagtttgggtagcacgccgggcaccttgagcgggccggcgaaggtctggacttgctcgatcatctgtcgcgccaggtagtgcggatccttgacgatgtcggctgcggtataggggtagccggccgggacgcgagcttctttcagcgcctcgatgacttcgtcgcggctgtgctgaatagtccattcgccgatggcggcgtcgatcagttcggcgtgctgggcgcgaccatcgttatgcgcaaagcgcggatcatcggccaggtcctggcggcccattagggtcatcaggcgtttgtaaatgctgtcgccattgccggcgatcagcacgtaggcgccgtcgttgcacaggtaggaattggacggcgtgatgccgggcagggcgctgccggccggttcgcgcacatagccgaaggcatcgtattcgggcaccaggctttccatcatggcgaataccgactcatacagggcgacatcgatttgctggcccttgccactgcggttgcgctcttgcagggcgagcagcacgccgatgacgccatacaacgacgacagcgagtctccgatgctgatgcccacgcgcaccggtggctggcccggatagccggacaggtgacgcaagccgcccatggcctcgccgatcacgccgaagccgggcaggtcgcggtaggggccggtctgaccgtagccggagatgcgcagcatgatcaggcgcgggttgagcttggagagttcgtcccagcccagcccccagccttcgagggtacccgggcgaaaattttccaccagtacatcggcttcggcgaccagctggcggacgatctgctggccctcggccgccttcaagtcgagcgtgacggactgtttgttgcgcgattgcacgtgccaccacagcgaagtgccgtccttgagcttgcgccatttgcgcagcgggtcgcccacgcccggcggttcgatcttgaccacctcggcgccgaattcgccgagcatcttgctggcgaaggggccggcgatcagctggcccatctcgaccaccttgaggccttgcagcggcaagccgtttccattctgttcgttcatcgcaacacctgtaccgggtcgaatcatgtgcgcaggatgaccgagcgccgcgccgcggacaattaccgaatagccaaggctggtttcgtgaagcacgaaggctatcagctgatgcctttccgcttccggcggtttatggtggccgcttcgtaacctgcgaatgcgagagccagccatgcggcgtgtcgatttcgttaccctgcgcctgttcgttgccgttgccgacgagcgcagccttacccgtgctgccgagcgcgagcatctggcgctcgcggcggtgagcaagcgcatcagtgatctcgagggccagctcggtgtgagtctgctctaccgccaacccaaaggcgtggagctgacgccggctggccatgccctgcttcatcacgcgcgcaacctgctcgacggtttgcagcaaatggatgccgatctcagcgaattcagccagggcgtgaaggggcatgtgcgtatccatgccaacacctcggcggtgatcgagttcctgcctgaagatctgagcgcctttgcgcggttgcaccctgaagtgaagatcgatctggaagagcgcgtcagcagcgataccctgcgtgccttgcgcgaaggcttgaccgacatcggaatcttcgccgggcacatgccggccgaggatctgcaggtgttcggctatcgcgaggacagtctggtgctggtcacgccacgtgagcacccgctggccacgcggcaacacatcgccttgcgcgacgccgccggcttcgacttcatcggcctgcagcaggacgcctcgctgcatgctttgctgcagcaggccgcgcagcaagtgggcacgccgttgcggctgcgcatccaggtacgcagcttcgaggccatctgccggatgatccataccgggatgggcatcggcgtgttgcccgagcaggtggtgcgcaactacctgccagcgctggatgtggcggtcgtcccgctgaccgacgcctgggcgcgacgagcgctgaagatcggcgtgcgcaatctggaaagtctgtctgtcaccgcgcggcagatgctcgagcacctcaccgctcgcgaaggcaaccgctgaaaagtggcgtaaagcggcgcagattttcggttgccttcgccagtaacgaagcctcgcttggccaaatatgaatgtcgccggcaaaggacagcggggtagagtcgtgccagctatccggctcacacaactacaaaacggagcttttccatggcacgactcacccgtggtatcactcatctgctcgccgcctcggccctgttcagcgtttttgccgtgcaggcagccgatccgatcctgatcaagttctcccatatcaccgccgacagcacgcccaaggggcagggcgcactgctattcaagaaattggtggaggagcggttgccggatcaggtcaaggtggacgtgtatcccaactcatcgctgtatggcgatggcaaggagatggaagccttgctgctcaacgaggtgcagatgctcgcaccggcgccgtcgaagctggagcagtacaccaagcagctgcagctgttcgacttgatgttcctcttcgatgacgtcgccgcggctcagcgcttccagcagtcggacaagggcaaggccatgctcaagtcgatggaagacaagggcatcaccgggctggcttactggctcaacggcatgcgccagttcacggcgaacaagccgctgcgtgagcctggcgatgcgcgcgggctgaagttccgtgtgcagccttcggacctgcaggcggcacagtattccgcgttgcgcgcggttccgcgcaagatggccttcgccgagatctatcagggcctgcagaccggcgtggtcaacgcccaggacaacccctggtcgaacatctacagccagaagtactacgaagtgcagaagtacatgaccgagtccaaccatggcatcggtaactacctgctaatcaccaacacccaattctggaacggcttgccggcgccggtgcgcaccgagctcgaacagatcatcgaggaggtgaccgtcgaggtgaacaagcaggccgaagcactgaacgagaaggccaagcagaacatcatcgacaccggcaagagcgaaatcctggtgctcaccgaagagcagcgcaacgcctggcgcgacgcggtacgcccggcctggaaaaagttcgaggcggaaatcggcaccgacctgatcgaggcagccgaggcggcgaatcaggcgcaatagactccagcgctatgcgtctcctagctttggtgggaggcgcgccccgcggcgaatgcgatggttctgtcagctcaaaagcaaaagcttcgccccgaggtcggggctcctatagaagagccgaagcgccacccgcgccgttttttgtgggagccgcgactccgcggcgaaagcgatggttctgtcagctcaaaaggcaaaagcttcgccccgagggcggggctcctacagaagagtcaaagtgccgcccgcgccgctttgtgggagtcgcgacccgcggcgaatgctgaggttctgcctgctcaaaagcaaaagcttcgccccgagggcgggctctcctacagaagagccaaagcgccgcccgcgctgcttctgtgggagccgcgacccgcggcgaaggcgatggttctgtcagctcaaaagcaaaagcttcgccccgagggcgggcctcctacagaagagccaaagcgccgcccgctctgcttctgtgggagccgcgccccgcggcgaatgcgatggttctgtcagctcaaaagcaaaagcttcgccccgaggtcggggctcctacagaagagccaaagcgccgcccgcggcgtcttttttgtgggagtcgcgacccgcggcgaatgctgaggttctgcctgctcaaaaggcaaaagcttcgccccgagggcgggcctcctacagaagagccaaagcgccgcccgcgccgtcttttttgtgggaggcgcgacccgcggcgaatgcggaggttctgcctgctcaaaagccaagcttcgccccgaggtcgggcctcctacagaagagccaaagcgccgcccgcgccgttttttgtgggaggcgcgccccgcggcgaatgctgaggtctgtcagctcaaaagcaaaagcttcgccccgagggcgggcctcctacagaagaaccaaaagcgcagcccgcgtcgctttgtgggagccgcgaccccgcggcgaatgcggaggttctgcctgcccaaaagccaaaagcttcgccccgaggtcggggctcctacatccccacggcgagtgccggcgttgtcagctcaacggcaacagctcagcccgcggaagtgccccccatcgcatgccctgaatccgcgtcagccgctctagctcttcgttgatggcgcggcggtcgcgctggttttcgacttttgcgtcggcctcgtcgcgcagggcgtgaatttcctcgtaaagggcgtcgagctgcgtgtcgctcggttcgccatgcagggcattcttcatacagcgcaggagcgtgatcagcacttgcggatcatggccggcgtagatgcggatcggcgcgattacggtctgtagcaggcgccgcatatccggttgggggtagaacagacgagcttggccgtcgatgcagccgatatcgaaagacggcacgcccccgagccgtttcagcagaacgccgataaggttgatcgcccgtatcgccgtgccaggatcgttgatcgccgggctgatggccttgaccgcaatttcggacatctgccgcatgccgtaagagacgttggcaccggcgaattccttgtcatggaagtcgaagcaatcgagcacatccgccgcatcgtcttcgctcagcggctcgctgaacttgatcagggggtggccctcgatcaggaagaaccccggctcgacctggatcatggccagcaggccacgcttgcgcaggatcttgcccaggcggcgttcgttcacttcgcgcaggtatccgggccgggccgcgggtacgcaccaccattcgccagcctctggcagcccggcgatcccggcaatacgtcggcggcgcttttcgaggttggtcgatgcgccgttgtagagctggctgaggatccagtcgacctggatcgattgcgacaccgagcgaatgaagacgacgaacagcgccatgcatgacatgccgaacagcagcgccagcagcaggccgagcgcggggacgctggccgggtcgttcttgttcagcgtgccgatcagcaacaggaaatagacgatgctgcccaggtagatgccaagggtcacctggtttcgcgtgtcgctgaccagccccggcagcacccgtggtgacagtcgggcggcagcgccgttgagcacgaccatcaccatggaaaagctgaacacggtgagcgaaatgatgccggtgatgagcgtgccgagaatttcgcggctgttgtcggcatcggtcaggcctgaggggagcttgtcgcgtagcgccgccgcggtggcggtcgattcgaatgccagcaccagcgcagccagagctgcataggcggcaggaatcaacaccggataaagggcgatgctgcccttgacgcgtttaacgacacgaaagaatacgttggctggatctgacatccgcacactccggcacgacgggcgcacgccctgatcatcctaagaccacgagcggcgccgaagtacgccccggccgaagcgtctatgctctagaggaaagttagttcttgacggcttgccagccagcggaacgcttcgcccccacgttgctcgaacgtggagtcgccaggcgctcggtgtgatacgcatggacgcctgtggacagggttattcaaaagataagaagaccgacgattgaggtattgccaatgagtgctgcgtccctgtaccccgtgaaaccggaagttgcggctcggtcgctgaccgacgaggccgcctacaaagccatgtatcaacagtcggtggtcaatcctgacggcttttggcgcgagcaggcggagcgtatcgactggataaaaccattttcgcgggtcaagcagacctccttcgacgatcaccacgtcgatatccgctggtttgccgatggcacgctgaacgtctcggccaattgcctggaccgtcacctcgaaacacgaggcgacgaggtcgcgatcatctgggaaggagacgacccgtccgagcaccgccacatcacctatcgcgagctgcaccacgaagtcagcaaattcgccaatgcgctacgcgggcaggatgtgcatcggggcgatgtggtcaccatctacatgccgatgattcccgaagtggcggtcgccatgctggcctgtgcgcgtatcggcgccatccattcggtggtattcggcgggttttctcccgaggcactggccgggcggatcatcgacggcagctccaaggtggtgatcaccgctgacgaagggttgcgtggtggcaagcggattccattgaaagccaacgtcgatgaggcgctgaccaacccgcaaaccagctgcgtgcagaagatcatcgtggtgcgtcgcaccggcggcgacatccgttggcatcagcatcgcgacatctggtacgacgacctgatgcgagtcgccggcgatgtctgcgcgccgaaggaaatgggcgccgaggagccgctgttcatcctctacacctccggctccaccggcaaaccgaagggcgtgatgcataccaccggcggctatctgctctatgccgcactgacccacgagcgggtcttcgactatcggcccggggagatctactggtgtaccgctgacgtcggctggatcaccggtcacagctacatcatctacggcccgctggccaacggcgcgaccacgttgatgttcgagggcgtaccgaactatccggacgtcaagcgagttggccagatcgtcgacaagcacaaggtcaatatcctttacaccgcgcccaccgcgatccgctcgatgatggctgaggggcgtgcggccatggagggtgccgacggttcgagcctgcgcctgctcggttcggtgggcgagccgatcaaccctgaggcctggcactggtactacgagacggtgggcaagtcacgttgcccgatcgtggatacctggtggcagaccgagaccggcggcattctcatcagcccgttgccgggcgcgacagccttgaagcccggctccgcgacgcggccgttcttcggcgtggtgccgggcctggtggacaacctgggcaacctgctggaaggcgccaccgagggcaatctggtcatccttgattcctggccggggcagatgcgcagcatctatcgcgaccacgaccgtttcgtcgatacctacttcaagaccttccgcggcatgtacttcaccggcgacggcgcacgccgcgacgaggacggctattactggatcaccggccgggtggatgacgtgttgaacgtgtccggccaccgcatgggcaccgctgaaatcgaaagcgccatggtggcgcaccgcaaggtggccgaagcggccgtcgtgggtgtgccgcatccgctcaaggggcaagggatttacgtgtacgtgacgctgctggcgggtgaggaaccgtccgagcagttgcgtcaggagctacagcagtgggtgcgcaaggagatcggaccaatcgccgtgccggatgtgatccagtgggcgccgggcttgccgaagacgcgttcgggcaagatcatgcgccgcatcctgcgcaagatcgccaccgatgaatacgacgcccttggcgatatctcgacgctggcggacccgggcgtggtgccgcaactgatcgaaacccacaagcagatgcgcttgcgctgagcgttggcagcgccgccacggctggcggcgctgctattagtcaaccgttcggcaacgcgctttgcgcttgctgattggcggcgggcttttccttcggcacacccgcgacgctcagctctggaaagctgccgccaatgaactcgacactgcgggtcgggaaggcgaactggacgcccatctcgcgaatgccatcgagtagctgcaaattgatttcctgctgggtatccatgtacgcgttgtagtccgacacctgcatgatgtagacgacctcgaaagtgagctggctgtcgtcgaaggcgagaaagtgggcacggtcgaacttggcgttgtccaggccctcgatgattcgcttcaccagcgccgatacctcgcgcaccttgtcagacggggtgttgtaggtgataccgaacttgaacacgatgcgtcgcgtgttcatgcgcttgtagttgtgcaggatctgcttgagcaggtcagcattggagcagacgatctgctcgccgctcagggctcggatgcgtgtggtcttcaacccgatgtgctcgatgttaccggcgacgtcaccgaacacgacgaagtcgccgatctcgaagggcttgtccacaccgatggacagggacgcgaagacgtcgctgagcaatgtctgcaccgccagtgcgatggcgataccgccgacgccgaggctggcgaccatggcggtgatgtccacgcccagattggcgaggatcgacagcagcatcatggtccagatgacgatgcggatcatgatgccgatgatcgtcgtggtgaccggatttcgcgccttgccgtcgcggttcaggctttccatccacagtcgaacggcggtatccatccacaacgcgatctggaaggcgagggcgatgaaccagccatgggccatcgccgattcccagcgatccggcagttcgacgaccttcagtgcgatcagcagcgacagcgcaatgagtaacaggtggctggtgcggctgagcatctccgccgcgatgcctacgaatccgcttctcgagcccttggccatctttcgcaggcgattggtgatgatccgtaagacggcctgcaggatcagatagctgacgaccgtgacgccagcgattatggcgatgttgatccaaagccgttcattcaacatcacgtcccaattcatcaactggattcctccggagtacgcgcgaccaagcgcttgagcagtggctcccttttcggtagccgctgttgcgcattagttcccgtgatagcgaagggctgttgagatggatgaagtgtttgcgcagatggagacgtgggcgttgcggagtcagcgagacgggacgacgtctttcagatcttcatagccaccggcattgatgacctggcgatagcccagctcccgcaacaggtcctgcgcggcggacgagcgccgaccgctgcggcaatagaccaccactggcgcgttcttgtcgggcgcgacgctggcgatacgtgcggcgaggtccttggtttcgatgcgcgtagcgccgggcagggcgccttcggcgtattcctgagcggtgcgcacatcgagcagaacgacatcatcgcgctgcagcgccgacaacgcggcgggctggtcgacctgaccgcccaatacggggccggtcaacgtcatcagcaaccaaaacactcgacgcatagggtgtctccgtggctcgacgccgacagatcagctgatcaagcgagtcaggttcggcaggatcaaaatgaccgcagtagccagcaaaatgaatgtcgcctgtctgattttcttttgtttgaacatggtagcggccttttcttgttctgacgccgagccctccgtttgactggatgagtcatcgcgccttgccgattaggggtgcgcctcgaaagatgatgcgcagtgaaagtgccctggcgagtagcagaggtctggtccgctttccagacatgctcggcccgcgagccgatttctgaacagagcgttggcttagctcaagcaatatatgggccagagagtcggttagaacgcttacgtcccttcaggacgaagcttttagcctttctgtgggagccctgccttcggggcgaagcttttgcttttgagcgggcagaacggcgcattcgccgcggggtcgcggctcccacaagaaaagcggtgcgggtggcgcttcggctctttctttgtaggagccccgaccgcggggcgaagcttttgcttttgagcgggcaaaacggcgcattcgccgcggggtcgcggctcccacaggaaaagcggtgcgggtggcgcttcggcgctttggcacttctgtgggagccccgccctcggggcgaagctctacttttcaatagacaggcgcgctattcgccgcggatggacctgtctaagcgagcgctcggctcagtccgaccgctcgtcagacaaccgctattgcggcgtttcatgggcggacaatcggtccttgcgtagtggcgctcgctcaaaggatggagcgaatggaaacgtcgcccggcctggctgcgtcagcggcgggtgaaatcggaacatccagagtaacgagcgcggctgcgccttcggttgaagggccggtaaaccagttagacgtgagtccgtctgcgaaagccaatagccagaaacaacaaagccccgataaacggggcttcgtgtgggatctggcggtgagggagggattcgaaccctcgatacgatttctcgtatacacactttccaggcgtgctccttcaaccgctcggacacctcaccggatctcgccggaggtttgaagtccgtcgaggcgcgctaatgtagccgaagagcctgcctatggcaaaaagtttttttagttttttcatgcggttaaggcaccgttggaaaactggctgagtggcgctggcaatgaacctatcgttgctctagcgttcgaacgcctatggcattggtgccagagccagcgcaattaccttttgtgaatatgtagagccgggaaatggcttgatgaagttattcaaaagcaagcgtaagcggccggacgtggtggaggtcgccacgaaacggcgtctgcacgtcagtcatctggagctcggcatgtatatctgcgagctggaccggccatggcgccagaccgactttctgtttcagggcttcccgctgctcaagctcgagcacatccaggcggtgcgagagcgctgcgattatgtcttcgtcgatgacacccgccgcgtgctgctcgaccaggggcaggtcatcgtgccgtcggcgacgccgctgcgcgtgacgcgcacgatgacgcgcatcccgcttgcactcgaagtccaggaagcgcgggaagcctatcgcagcagcgccctggcgctcgaccaggtgctgtcggacgtccagctcgggcggccaatcgataccaaggcctgccaggcgttggtcaagcggaacctggaaagcatgttgcgcaacgagagcgccatgctctggctggcgcgcttgaagtcacaggatctgtacaccagcctgcactgcctgtccgtgtccatcctggcgatgggcttcggtacgcatctcggcctgcccgacgagaagatcgaactgctcgggcttgccgggttattgcacgacgtcggcaagatgaagatcgaccccgccatcctcaataagccgggcaagctgactcaggaagagttcgagcacatcaagctacacccgagcttcggctaccaggcgctatgcagccaggacgacatccccgccgctgcggtgcaggcggcacacggacatcatgagcggctggacggcaggggttaccctcaagggctcgatggctatcagatacccttcatcacccgggtggtcaccatcgtcgatgccttcgatgcgatcaccagccaccgtgcctatgacgatgcgcggcccattcagacggcgtacgacgtgctgcgtagcggtgccgacaagcagttcgatggggctttggtacaggaattcatccgctggctcggtgtctttccggtgggcacgctggtggagctgcataccggcgaagtcgccttggtgctggagaagcatccccagctgcatctgcgaccgaaggtggtggtgctgcgcgacgcgaacaaggcgccctgcgagccgcgctacctggacctctcccagctgaccgtcgacgtcgacggcacgccgtatcgaatcagcctcggtatctccgacggttcctacggcctgtatatcgccgatccccagttgcagtcgatcctgcatcccgagctgttcgcggtgctcgagctcgagccggaacaacctgaagcctgaaggcaacgcttgcgcccgggccaggcgcaccattcgcccgtaattcatgactcgccagtcagtcacgacgctttacctggagaggcgtgctgggtaacgtctgctcacttctaacaaggaatattcgtcatgagtgatctggtttcctacgaactcgaagacggcatcgccaccctgaccctgaacaatggcaaggtcaacgcgctgtctcccgctatgttcgatgcgctcaacgccgccttcgatcgtgccgagcaggaccgcgccgtcgtgattctcaccggccagccggggattctctccggtggctacgacctcaaggtgatgacctcgagtccggaaaatgccatagcgctggtgacggttggctcgacgttcactcgacggatgctcgcccatcccttcccgatcatcgtcgcgtgcccagggcatgccatcgccaagggcgccttcctgctgctctcggccgactaccgcatcggtgtggagggggcgttcaacatcggcctcaacgaggtccagatcggcatgaccatgcaccattccggcatcgaagtggcgcgcgatcgcctgaccaagcccgctttccatcgctcggtaatcaatggcgagatcttcaatccgcaggcggcgctggaagcgggcttcctggacaagatcgtcccggccggcgagttgatggacgtggccaaggcaacggcggcccagttgaagaagatcaacatgacggctcacaagaacaccaagctcaaggcgcgtaaaaccttgctcgagacgctggaccgggccatcgagctggaccagcagcattccatcgtgccttgaagagaattttcgccggaccgcccattcccggcgggcctgcgtttaaactgagcctgcaacgccccgccacggtggggcgtttttcattccatgagtgccgtatcgcaggagagtcctgatgtccgccccgcacaccccggtagaacgcgccgatttcgaccaggttatcgttcccactttcgctcccgccgctttcatacctgtgcgcggcgagggctcgcgagtctgggatcagagcgggcgagagctgatcgacttcaccggcggcattgccgtcaacgtgcttgggcatgcccatccggcgctggtggcggcacttaccgagcaggctggcaagctctggcacatctccaatatcttcaccaacgagcccgcgctgcgcctggcgaagaagctcaccgcggcgacctttgccgatcgcgcatttttctgcaattcgggtgctgaagccaacgaggcggctttcaagctcgcccgtcgctacgcccatgacaagcatggcgcgcagaagcacgaaatcatttccgcggtgaacagcttccacgggcgaaccctgttcaccgtgacggtgggtggccagccgaagtattccgacggcttcggaccgaagatagagggcattagccacgttccctacaacgacctcgatgcgctcgccgcaaccatttcggacaagacctgtgccgtggtgctggagccgatccagggcgagagcggcgtgctgcccgccgatcaggcttatttggagggcgcgcgcaaactctgtgatcagcacggcgcgctgctgatcctggacgaggtgcaaaccggaatggggcgcaccggtgagctttacgcctacatgaattacggcgtcacgccggacatcctgaccaacgccaagagcctgggcggtgggttcccgatcggcttgatgctgaccaccaacgaaatcgccgcgcatttcagcgtcggtacccatggcacgacctacggtgggaatccgctggcctgcgcggtggccgaggcggtggtcgatatcgtcaatacgccggaagtgctcgctggggtcaaggcgcgccatgagcgcttcaagcaaggcctgctggagatcggccagcgtcacgggctgttcagccaggtgcgcggcatgggcttgctgatcggttgcgtgctgaatgacgcctggaaaggccgtgcgcgggaaatcttcgatgccgccgagcgcgaggcgctgatgatcctgcaggccggtcccgacgtgatccgcctggcgccgagcctgatcatcgaagaggcggacatagccgaaggtctcgcccgtttcgagcgcgccgcggcaaaactgactcaggcctgagcccggccttacctatggcgggacgccatccgtcccgtctttgtccctttatcgagagtgtgaccatgagcgatagcctgcaactgatccttgaagatgtagacggcacccagctggagacctcctgcacccgctttgccgtgatgtggcaggggcgggaagtctggattcagcaggtcggcaacaaccagctgatgattggcgtggatgtcgaagacggcgataccgagtacgccaacctgctgctgcgaccgctggcgaccaatctggtcagtctggagttggaaatggaaccggtcgaacccgccgaagacgaccatgtacatggccccgactgtaatcacgaccattgatgacaccgcgacgctggccctcgaccggctgctggaactgacgctggccgggcgcgagcccgagcagaaagagcagttcaccgctgagggcgtcaggctgcaatggctgggtgagggcgcgctcgaagtcacgccggcgcctggccgggatgcagggctggacctggtgttgtcggctggcgtgcacggttgtgagcttgtcccgatcaggctgctggacgacttgatacgagcgatcggacgcggcgagatccacccccgtgcccggctgttgctgctgttctgcaacccaccggcaatgcgccagggcgtgcggcggatcggccaggacctgaatcggcttttttgcggcaagcatgcggagattgttagcgacgaggctcgccgcgccgctcgactggaagcctgggttgcggaattctttcgcgagtcaggtcgtcgccgctggcactacgacctgcattcagccatgcgcgcatcgaagttgccgcagttcgccgtctgcccctggatgccggatcgtgaagcgtcttccgaaagcctgatgcggttgcggcacgcggcggtggacgcggtgctattgcaggaaaagccttccgcgaccttcagcgcccataccgcaactcgccacggcgcagaggcgttcacgctggaaatggccgaagcgcctgacgggacatggccggagtgcctcgacgattttctccaggcggcccgtcagtggatcgaagtggactcgcctgcgcaaacgaagccggtgcgaccgctgagaacgttccggttggcgcgggaaatcatcaaacgtagcgatgcgttcgtcctgcgcctgcctgccgacatcgaaaatttcactgaattgccccctggaacgctgctggcggaagacgagggcggggttcgctgggttgctgaggagccaggcgcgcgcatcctgtttccgctcgccgacgtcgcgatcggcgagcgcgccggactgatcgtggtgccgcgcgactgagcagctcggacgcctgattcgccgcggggcgcgcctcccacaaaaaagcggtgtggatggcgcttttggcgcttctgtagaggaggcccgacctcggggcgaagcttttgcttttgagctggcagagcctccgcattcgccgcggggcgcgcctcccacgaaaagcggtgcggctgacgctttggctcttcttgtaggaggcccgacctcggggcgaagctttgcttttgagtggcagcacatcccgcattcgccgcggggcgcgcctcccacaaaaaaaagcggtgcgagtgacgcttttggctcttttgtaggaggcccgacctcggggcgaagcttttgcctatgagcgggcagaatctccgcattcgtcgcgggtcgcggctcccacaaaaaagcggtgcgagtgacgcttctggcgcttctgtaggaggcccgacctcggggcgaagcttttgctttgagctggcaggacatccgcattcgccgcgggtcgcggctcccacaaaaaaagcggtgcgggtggcgcttttggctcttttgtaggaggcccgacctcggggcgaagcttttgctttgagctggcagaacctccgcattcgccgcggggcgcgcctcccacgaaaagcggtgcggctgacgctttggctcttcttgtaggaggcccgacctcggggcgaagctttgcttttgagtggcagcacatcccgcattcgccgcggggcgcgcctcccacagaagcagcgcggcggcgctttggctcttctgtaggaggcccgacctcggggcgaagcttttgctttttgagctgacagaaccatcgctttcgccgcggggtcgcggctcccacagaagcagcgcgggcggcgctttggctcttctgtaggaggcccgacctcggggcgaagcttttgctttttgagctgacagaatcatcgctttcgccgcggggtcgcggctcccacagaagcagcgcgggcggcactttgactcttctgtaggaggcccgacctcggggcgaagttttgcttatgagtgggcagaatctccgcattcgccgcgggtcgcgcctcccaaaaaaaacgcggtgcgagtggcgctttggcgcttctgtgggaggcccgacctgggggcgaagcttttgctttgagctggcaggacatcctcattcgccgcgggtcgcggctcccacaaaaaagcggtgcgggtggcgctttggcgcttctgtgggaggcccgacctcggggcgaagcttttgctttgggctggcaggacatcgcattcgccgcggagcgcgcctcccacagaaagcgagctgcgacagcgttggctatggccgatcagacgccagccggcgggttctcgagcgagtcgttacccgtcaccgcggccgtgccagtggcggcctgggcgttggctttcattcgcgcctcgtcggcctcgttgcgttcgagcggcatactgcgggagttgccttcggccatcctggcatgctcgctcacttcgcaaagcacgcgcttggcttcgcagtggccggtgaacccgcgcgccagggccattccgcccattgccagttgaaccagcccgcctaaaccgccgcgaccaagccccttgccgacgaaatacaacccgccgataaccgatgcggcgcgctcccagccatgcacattctgcggtgtcctgttcatgccatatcactccaaacagtggtatgagaagtgaccgcggcatgcaggtgccgttccgaccgcaagtcggcagatggccccgcgcctgccggtacgttggctgtggataccgcggccggcttatcggtcagccatgccgaacaccttgagcacgaaggcgtattccatagcgacgtccttgagtgcctgatagcgaccgctcataccgccatgcccggcgccgaactcggtcttgagcagcagcaggttgtcgtccgtcttgctggcccgcagcttggcaacccactttgccgcctcccaatactgcacgcggctatcgttatagccggccacggcgaggatggacgggtaggcctggggctgcacgttttcgtatggcgcataggccttgatgcgttcgtgcacctcgggttggttcgggtcaccccactcgtcgtactcggtcacggtgagcggcaagtctgcgtttagcatggtgttcagcacgtcgacgaaaggcacttcggcgatcgccgcaccaaacagttccgggcgcaggttgagcacggcaccgatcagcaggccgcctgcgctgccaccgctgatagcgagtcgagtcggttcggtatagccatcggcgatcagttgctcggcacaggcgatgaaatcgttgaaggtgttcgccttatgctgcaacttgccggcgcggtaccaggcctcgccaaggtcaccgccgccgcgcacatgggcgatcgcgaaaataaacccgcggtcgagcagcgacagccgcgcatgggaaaaccaggggtcgaggctgtgtccgtacgcgccataaccgtacaggtagagtggcgcaggcttgccgaactgctcgcgccggccaaccaggctgataggcacctgcgtgccgtccgcagcggtggcccagattcggcggctctcgtaggcatcggcatcgaaaggaccctcgaccggggtctccttgagcacctgttgctcgccattggcgagcaacagctggcgaatctgcgccggacggttcagggcttcatagcgcagccgaatcaccgggctgtcgaactcgagggtgttgtgcacgtgcagactgtaggccgcgtcgggtagctgcagccggtagggctcgcctgccgagggccttacctcgatgatcggcaagccggcctcgcgcaggctcagcgtgactgcgctggcgttcaggctgacgtcttcgagcatcacctcatctcgatggccgatcagctcctgccagtgctcgcgctgtggcgtgcgctccggcgcctggtacagggcgaagttgataccggcctggttgctgcggatcagccagctccactggccgtcgagcaggccgtggtcggggaagtattcatgatcgtcctcacgtggtgcgaggcaggtccaggccccttcgggctgatccgctgacagcacccaggcttcgctggtggttttgctattggacaggatcaccagctggcgctcggaactggcgcggtaacagtgcacgaagaaacgcccgtccgggtcgtgatagacctcagtgcgaccgctttcgccgagccggtggcggtagattttgtgcgggcggtgggtgtcgtcgagttcgccgaagaacagcgtttgatgatcgttggcccaggtcatgctgccgtcgcaatcgtcgaagggtagggcgacgacctcgcctgtattcagatccttgacgaacaatcggtagatttcgtcgccctgggtgtcgaggctgtaggccagcttgctgtggtcctggctgacgctgaacgcgcccagcgacaggaagccgccggccgccagctcgttggggtcgagcagcagttgctcggcctgttcatcgaccttgagcgaaccgtcggccggtcgcgggcagcggtagtggcgtggatattcatcgcccgccgtggtgcgctggtagtacagccatgggccccagggcgagggcagcgacaagtcggtctcgcggatgcgtcccttgatttcctggaacaacgcttcgcgcagatctgcctgctccgccagttgactgtccaggtaggcgttttccgccttcaagtagtcgagcacctcgggcgcgtcgcggttctcgagccacttgtacggatcctggccttgatcggcgcgggcaatgggggcagcagacatgcatgactcctgaaaaaggccgcgagctggcgcagctgtacggttgtaggcgggcacgagtgtactagtgcctcacccgtttgtgacggtgacacgcggccggggttcatcggccggtttgcgccgatcagccatgtgaatggctgacaatgcggggaaaacaggcttgggcggctgcgacatgccgggtctcgactaggcttatcgatcggatcgcaaacgaaggtcgccgcctggattggccagccgattgacattgcagcgcttttccatgaaggtgtgctcacccaaatcaaacgggcgtatgaatcgagcgtttgccacgcaaatgccgtcagcccggtttatcgtgtcggtgggtgtcgtttcaccgggtgtcgctacgccagtcggtgacggtctcaggatcgatgacgtgcgacacgtaacgttcagcttccataccgtggagatcagttgatgatttacgaaggtaaagccatcacggttaaggctcttgagagcggcatcgtcgaattgaatttcgacctcaagggtgagtccgtcaacaagttcaaccgcctcaccctcaacgatctgcgccaggccgtcgacgccatcaaggccgatagctcggtgaagggcgttatcgtcaccagcggcaaggacgtattcatcgtcggcgccgacatcaccgagttcgtcgacaatttcaagctgccggacgaagagctggtcgccggtaacctcgaagcgaacaagattttcagtgatttcgaagacctgggcgtacccacggtcgccgtgatcaacggcatcgccctgggcggtggtttcgaaatgtgcatggcggccgactatcgcgtcatgtcgaccaatgccaaggtcggtctgccggaagtcaaactgggtatctacccgggctttggcggcaccgttcgcctgccgcgtctgatcggcgtggacaacgctgtcgagtggatcgcttcgggcaaggaaaaccgcgcagaagacgccctcaaggtgcgtgcggtcgatgctgtggtggcccctgagaagctgcaggccgctgcgctggatctgatcaagcgcgccatttccggcgagctggactacaaggccaagcgtcagccgaagctggacaagctcaagctcaacgccatcgagcagatgatggccttcgaaacctccaagggtttcgtggccggtcaggccggcccgaactacccggccccggtcgaagcgatcaagaccatccagaaagccgccaacttcggtcgcgacaaggccatcgaagtcgaggccgccggcttcgtcaagctggccaagacctccgtggcgcagagcctggtcggtctgttcctgagcgatcaggagctgaagaaaaaagccaaggcctacgacaagcaggcccgtgacgtgaagctggctgccgtactgggcgcaggcatcatgggtggcggcatcgcctatcagtcggctgtcaaaggcacgccgatcctgatgaaggatatccgcgaggaaggcatccagatgggcctggacgaagcctccaagcttctcggcaagcgcgtcgagaaaggtcgcctgactccggccaagatggccgaagcgctcaacgcgatccgtccgaccatgtcctacggcgatttcagtcacgtcgacatcgtcgtcgaagccgtagtcgagaacccgaaggtcaagcacgccgtgctggccgaggtggaagggcacgttcgcgaagacgcgatcatcgcctccaacacctccaccatctccatcagctacctggctcaggcactcaagcgtccggaaaacttctgcggcatgcacttcttcaacccggtgcacatgatgccgctggtggaagtcatccgtggcgagaaaaccagcgaaaccgcaatcgccaccaccgtcgcctacgccaagaaaatgggcaagagcccggtcgtggtcaacgattgcccgggcttcctggtcaaccgcgtgctgttcccgtacttcggcggcttcgcccgcgccattgcccacggtgtcgacttcgttcgcgccgacaaggtgatggagaagttcggctggccgatgggcccggcctacctgatggacgtcgtcggcatggacaccggccaccacggccgtgacgtgatggccgaaggcttcccggaccgcatgaaggacgacagcaagaccgccgtcgacgtcatgtacgaggccaaccgcctcggtcagaagaacggcaagggcttctacgcctacgagatggacaagaagggcaagccgaagaaggtggtcgatccccaggcttacgagctgctcaagccgatcgtcagcgaaacccgcgagctgtccgacgaggacatcatcaactacatgatgatcccgctgtgcctggaaaccgttcgctgcctggaagacaacatcgtcgagaccgctgccgaggccgacatgggtctgatctacggcatcggcttcccacccttccgtggtggtgcactgcgctacatcgattcgatcggtgttgccgagttcgtggcgctggccgacaagtatgccgacctgggtccgctgtaccacccgactgcgaagctgcgtgaaatggctgcaaacggccagcgcttctacggctaaaaggcctttgaaagcgtagcgagcgaaggcagggcgaggcgaagacagtcgaaaaggcggagtttacgagtagtaaatgagcactttgaggctgacttcaacgaagccctgcctagcgcagtagctttcaaggggcttttctaatgaggaatagagagaatgagccttaatccgagagacgtcgtcattgtcgacttcggccgtaccccgatgggtcgttccaagggcggcatgcaccgcaacacccgcgccgagaccatgtccgcgcacctgatcgatggcttgttggcacgtaaccccaaggtcgatccggccgaagtggaagatgtgatctggggctgcgtcaaccagaccctggaacagggttggaacattgcccgcatggcttcgctgctgacgcgcatcccgcacaccagcgccgcacagaccgtcagccgcctgtgcggctcgtcgatgagcgcgctgcatacggccgcccaggcgatcatgaccggtaacggtgatgtcttcgtcgtcggtggtgtcgagcacatggggcacgtgggcatgatgcacggtgtcgacccgaacccgcagctgtcgctctacgccgccaaggcgtccggcatgatgggcctgaccgccgagatgctgggcaagatgcacggcatcacccgtgagcagcaggatgctttcggtgagcgctcgcatcgcctggcgcatcaggcgaccgtcgatggcctgttcaaggatgaaatcatcccgatggaaggctacgacgagaacggtttcctcaaggtcttcgactacgatgaaaccattcgtccggaaaccacgctggagagcctggccgcgctcaagcctgctttcaacccgaagggcggcaccgtaacagcgggcacttcctcgcagatcaccgatggcgcttcgtgcatgatcgtcatgtccgcgcagcgtgcgcaggacctgggcatccagccgatggccgtgatccgctccatggcgctggccggtgtcgatccggcgatcatgggctacggtccggtgccggccacgcagaaggcgctcaagcgcgccggtctgaccatggacgacatcgactacgtcgagctcaacgaagccttcgcggcccaggcactgcctgtgctcaaggacctgaagctgctcgacaagatggagcagaaggtcaacctgcatggcggtgccatcgcgttgggtcatccgttcggttgctccggagctcgtatttccggcactctgctgaacgtgatgaagcagaagggcggtaccctcggcgtggccaccatgtgcatcggcctgggccaaggtatcaccacggtgttcgaacgcgtctaagctgtgcggtaacacgaaaaccggggcctcgtgccccggttttcatttagtggatgctttttgcagaggcagtcgagatgcaggtcacgccaggccgttatcgccattacaaggggcccgagtatcgggtatatgcagtcgcacggcactccgagacggaggagccggtggtcttctatcaggcgctgtatggggatttcggcctttgggtgcgcccgctttcgatgtttaccgaaacggtggaagtcgacggtgaaacgcttccccgttttgccctgatcgaggccgagcccagtcgtttctgacgctcgtacggactcgctggcttaaccctcacgcttgacctcggctctgtcaccactatatatagcggtgctttcggaccgagccgacgcgaattcacttggttccaagcggtaaaaccgctgccgagcaagcagattgccgagcgaatggcagcggatacgaaagatttcggagcaattgaatgctcttgcagtccgtgaaaagactgcttcgcttctttctggcaggctgggcgctttttcagcactcggctcttgccggttcaatattttcagttcacctctcgattcaggaactctcctctccatgggtaaatcgctggtcatcgtggaatcaccggccaaggccaagacaatcaacaagtatttgggcaaccagtacgtggtgaagtcgagtatcggccatatccgcgaccttcccaccagcggctcagccaacaaggagcccgtcaagcgcggcaaggcggccgccgccgaggcgcccgccttgtcgccgaaggaaaaggccaagcgccagctgttcgcgcgcatgggcatcgaccccgaacatggctggaaggccaagtacgagatcctgcccggcaaggagaaagtgatcgaggagcttcgccgcctggccaaggaagccgacaccatctatctcgcgaccgacttggatagagagggggaagccatcgcctggcacctgcgcgagtccatcggtggcgatgacagccgctacaagcgcgtggtgttcaacgagatcaccaagaaggcgattcaggaggcgttctccaagccgggcgatctggacatcaaccgggtcaacgcgcagcaggcgcggcgttttctcgatcgtgtagtcggttacatggtctcgccgttgctatggtcgaagatcgcccgcggtctgtccgccggtcgcgtccagtcggttgcggtaaagctggtcgtcgagcgtgagcgagaaatccgcgccttcgtgccggaagagtattgggaggtccatgccgatctcgccacgggcgacaacgccaaggtccggttcgaggtcgctcgcgaaaatggcgaggcgttcaagccattgaacgaaagccatgccatggctgcgctcgagcaactgaagggtgcgaactacagcgtcgccaagcgcgaagacaagccgaccagcagcaagccttcggcgccgttcatcacctcgaccctgcaacaggcggcgagcaaccgactcggtttcggcgtgaagaaaaccatgatgatggcgcagcggctctacgaagccggctacatcacctatatgcgtaccgattcgaccaatctgtcggccgacgcgctgaacatggtgcgcgaattcatcgaggacgagttcggcaacaagtacctgccggagaagccgaacttctattccagcaaggaaggcgcgcaggaagcccacgaagcgattcgcccctccgacgtcaatctgcgtcccgctcagctatcgggcatggagcgcgatgccgagcgcctctacgacctgatctggcgccagttcgtggcgtgccagatgccgccagcccagtacctgtcgaccagcgttaccgtcaccgccggcaacttcgagctgcgtgccaaggggcggatcctgaagttcgacggctacaccaaggtcatgccgcagcagagcaagagcggtgaagacgatgtgctgccggagatgaccaagggcgaggcgatgaagctgatcaagctcgatccgagccagcatttcaccaagccgccggcgcgctactccgaagcgagcctggtcaaggaaatggagaagcgcgggattggtcgtccatcgacctacgcggcgatcatttcgaccatccaggatcgcggctacgtgtcgctgcacaaccgccgcttctattccgagaagatgggcgacatcgtgaccgagcgcctctcggagagcttcaacaacctgatggattacggattcaccgccggcatggaggagaatctcgacgatgtcgcccagggtgagcgtgagtggaagcatctactcgacgagttctatggcgacttccgcaagaagctcgaggtggccgaagccagcgagaatggcatgcgcgccaaccagcccacactgaccgacattccctgcaaggtctgcggccggccgatgatgattcgcaccgcgtcgaccggtgtgttcctcggctgctccggctacagcctgccgccgaaagagcgctgcaaatccaccgtcaacctgattccgggcgacgagattgccgccgatgacgagggtgagtccgagtcccgcgtgctgcttggcaaacaccgctgcccgatctgcagcacggccatggacgcctatctgctcgacgagacccacaagctgcatatctgtggcaacaatcccgattgcagtggctacgagatcgaagaaggccaataccgtatcaagggttatgaagggccgagccttgagtgcgacaagtgtcgcagcgagatgcagctgaagactggtcgtttcggcaagtttttcggctgtaccaacgccgactgcaagaacactcgcaagctgctgcgcaacggcgaggcggcgccgccgaagatggatgcggtgaagatgcccgagctcaaatgcgaaaaggtcgacgatacgtacgtgttgcgtgacggtgcatccgggctgttcctggccgccagccagttcccgaaaaaccgcgaaacccgcgcaccgctggtgcaggagctgatcccgcacaaggatgaaatcgatccgaagtatcatttcttgctgagcgcgccgcagaaggacccggagggccgtccagccgtgatccgcttcagccgcaagaccaaggagcaatatgtgcaaaccgaggtcaacggcaagccgaccggctggaaagccttcttcgacggcggaaaatggaaggtggaagacaagagcaccaagtaggctaaaagccaataagggcgctttgggctgaaggccggacgtgtgtcgacttcagctccacctcccagattcaggtgttcggattgcgatttctgcgtctgtcgccatacttcccagctccagctcatctacgaggtccacccgccatggctcatgagctctacacccgtaccaatcagaagatctatttcgccgggcttgcgctcgaggattggcggcgggccgaagaaaagggggctatgaacgcacccggcctgatccaggccgagcgggaagccagcctgttccatctctacggcgcgctgctgggtttatgccacgagattgccggctactaccggttgcccggcgctaccgcgccccgggtggagatgctgctggtgcgttcgccgaacagcgtatcgccgagcccggagttggccgagctgaccgagctggccgaacacggcgagacctggctcgcccagttgctgaaggcccatgccgcgttgttcgagccgccacgtgcgccggcgaaggccaagaccgacccgaccatgccgctgatcgaggcggttagcgtggaagaggacgtaccggcactggggcgcgacgaggtggaaacctggcgaggcaatctgaaggaactggccttgcgctttcgcgagtcgcttaccgagtggtaggcaacgacgcgaatcgggagactcggtctggcgtcacgtccggtgcttgtatcgcagcaccagggcgatgccgccgaggatcgcaaccccggccagcatcagtctgcccgtcaaactctcacccaatagcacgcttcctgccagcgccgtgaggagcggaacgctcagctgcacgctggccgcttgtatcgcggccagcccaggcatcgccgcataccagatggcgtagccgataccggaggtaagccctccggataacagcgcatacaccacgccggcgctgtcccattcgagcgagcccagtgccaccaggcacagcactgcgacgatgggtagagtgcggatgaaattgccagccgtggcggcgagcgggtcgggcgtaccttttcccagtagtgaatacgcgccccacgcgatgcccgccagcaccatcagacatgatgccgataacgacggggtgctcgtgccgggcagtagcagggcgaccagtccggccgccgccagcaccaatccgactacctgcaagcgatgcaagcgctcccccctgagaagcccccaggtaatcatgctcaattgcacggcgccgaacagcaatagcgcaccggcgcccgcatcaaggtgcaagtaggcataagaaaacgccgcggcatagatgaacagcgaaaaggcgccggcccagttgcccggcaccgtggcggcacgcttgcgtgtgtacagcagcagccacaacaccagagcgccggcgaacaggcgcagcgcggtgaagctggccgggtcgatctggctgtcgcgcagcgccgcgcggcatagcagcgaattgcccgcgaaggcgagcatggccagtgctgtcagcagcagggttctagcggtcattgttctgcccgatcggggatatagcttgcatcgtactgtgccatcactgccggctgccactgtccgcaggagagtgacgcagctcctggcccgcagacaccaaagctgcctatgaggcggtcggctggtacaatgcgccgtttaacggggagcagactcatgccaacgtcttttttggaaatcgtcgagctacccgacggcagtatcgttttgcgtcgtgctgaggatgagggtgtactggtgacgttggatttctctgacgatgccaaggtgtttttgcaaggtcagcatgtcgaaattgccaaggcgatgttcaacgtcggtgtgcagatggcggggcgggtatcggaaggggagttcgagcgggaagaggaaggtccgcgcgtactgcattgaggggtggcggtgcgaagggcgagtggcgttgggcgggtttcggcacgtccatatgccgagaactgaatgggttagcccaggcgaatgttcaggctttgtgcgttgccttgagccgctgccacgcagagcttcagtcgactcgccttgtcgaggcgtggaaaccaggtgatgaccgtgtggctgcagcctgacatcaacgccttgcatgccagttcgagcgtggcctgcgtctcgcgggcctgcaataacaggatgcggtcacggtttagcccggcttcccgtagccagctttgcgaaagggcggcgggcggcgcgatcagggtcagccaccgcgtatcggtcgcctcgctgaactcgcgcaggatgggcgccagcaataggcggcagtgatcaccgctgccgctcagcgtcatttcgctcaggcgatcgtcggcaggttgcgggatgggcgtgctggtatcgctcgcgaacggagccaggctgcgtgcgatcagcccttcgaacaacgagagctggggtggctggcctgcgatgggttggggttggtactgcataaacctctccttggcaggcgttgaacgacctgcattgccaatacttattgaaaccgcctcgtcttgcctacggccacgctctctgctggtcgctagcggcgtatcacgccgacgctcaagccttcgattaccagttcctgttgctcgagatcgatctcgatcggggcgaactcggcattctcggcaagtagccagaccttgctgccttcacgcttgaagcgttttaccgtgacttcatcatcgatgcgtgccaccaccacctgtccgttacgcgcctcacgtgtggtatgcacggctagcaagtcgccgtcgaatatgccgatgtccttcatgctcatgcctcgtacccgcaataggtaatcggctttcggttgaaagaatgaagggttgatctggcaggattcttcgacgtgttgctgcgcgaggatcggcgcaccggccgcgacccggccgatgatcggcagtccgctctcttcggtcgtcggttcgaagcccggaatacgtatcccacgcgacgcgccgggcgtcatctcgatagcgcccttgcgagcgagcgccttgaggtgttcctcggcagcattgggtgacttgaaacccagctcctgagcgatctccgcccgcgtcggcggatagccgttgtcttccaggcagcgcttgatgaaggcgagaatttccgactggcgaggggtcagcttgatcatggcggtctctgttcttttatacagtgactgggattatatacagtgcttgatgcttggcaatctttgtttggttgaggcccggagcggcttggtgcaagctttgccacgccgaacgggccttctaatgatttcttggttgacttggtataggttgaaacgtaagtttcaaacgagtgtttgtcaggggagggggcatggcgcagtctgaaacagtggagcgtattctggatgcggcggaacagttgttcgccgagaagggcttcgccgagacttcgttgcgcctgatcaccagcaaggccggggtgaacctggccgctgtgaactatcactttggctcgaagaaggcgcttatccaggcggtgttttcacgttttctcggtccgttctgcgccagtctggagcgtgagctggaccggcgcgaagcgcaatccgaccgaaaggagaatctcgaggagctactggagattctggtcgagcaggcgcttgcggtgacgccgcgcagcggtgacgacctgtcgatcttcatgcgcctgctgggtctttccttcagccagagccagggccacctgcgtcgctatctcgaagacatgtacggcaaggtgtttcgccgctacatgatgcgtgtgcatgaggccgctccgtccattccgccgatcgagctgttctggcgcgtgcacttcatgctgggtgcggcggcgttcagcatgtcgggtatcaaggcgttgcgcgctattgccgagaatgacttcggcgccaagacgtccatcgagcaggtcatgcgaatgatggtgccgttcctcgccgccggaatgcgcgccgactccggcgtggtcgacgagcgtctggcacaggcgcatccggtcgcccgtcgcaatgccctggcaatgcccgcaaaggggtgaggtgcaagggcaggcgcgtatcggctaagcttgccgcccatgcctgatctcgattttcttcatgtttcgattgccgaccagatgctgtacggattctccgacggccatctgcgcgtccgcttgcccgtgtctaccgcgcgtaacggcgtcggcgaacgcaatggttccggctgtaccccgcgtggccgccatcaggtgcgtgcgcgcataggtgacgggttgcccctcggtgccgttctgcgtggccgccgatggactggtgaggtctggaatccggatctgcatgagcagttccccgggcgcgactggatcctgacccggatcctctggctcagcggttgtgagccagggttcaatcgcctgggcccggtcgatacgttccgccgttacatttatctgcatggcacgcctgattcagagcccatgggcgtgccgctttcccatggttgcatcaggctgcgcaatgccgatctgctcgaccttttccctcgcgtgccggttggctgtgccgtgcagatagaggaagcagcctgtcctgactggtcgagcgcaacgctgaattaaggatttgcccaatatcatgcaaggctcactgatgctggacatcgccggcacctggctgaccgccgaggaccgccagatactgcgccagccggaagtaggcggactgattctgttcgcccgtaatatcgaacatctgagtcaggtgcaggatctgtgtcgcgcgatccgtgccgtacggcccgatatcctgttggctgtcgaccaggagggcggccgtgtgcaacgactgcgacgcgattttgttcgcctgccggcaatgcgtgacttcgccacgcaccgcgatgctgagcagttggccgaaatctgtggctgggtgatggccaccgaggtgctggccgttggcctggatttcagcttcgcgccggtactcgatctcgatcatcaacgcagcgccgtggtgggtagccgggcgttcgagggcgatcctcagcgagccaccgcattggccggggcgttcatcaagggtatgcacagcgctgggatggcggctacgggcaagcacttcccggggcatggttgggccgaagccgattcacacgtcgcgattccagtcgatgagcgcggtctggatgagctacgccgcgctgacctgattccgttccagcgcctgtccaacgcgctggacgcggtgatgccggcgcatgtgatctatccgcaggtggacgacaagccggccggtttttcccgccgctggctacaggacgtgctgcgtaatgagttgggttttcgcggcgtgatcttcagcgacgatctgtcgatggccggtgcgcacgtcgtcggcgacgcggcgagccgcatcgaggcagcattggctgcaggctgcgacatggggctggtatgcaatgaccgaggcgctgccgagctggcactgtcggcgctgcagcggtttggcgtccaaccgtctccggcgctggcgaacatgcgccggcgcgcgtccgtttcgctggaatacaaacaggatccgcgctggcgcgcatccgtggcggcgttgcaagccgctgaactgatcgtttgactcaagggaacccagatgactgtctatgccattatcggcggcaccggcctgaccgagctgcccggccttgtcctggaccaggcggtgccgatggaaacgccctatggtgcgccgtcggcagatgttctgcgtggtacctacgccggtcgggacgtgctgttcctggctcgtcacggccatccgcaccgtatccccccgcatcaggttaattaccgcgccaacctctgggcgctgcggcaggccggcgcacaggcaatcatcgcagtcaacgccgtcggtggcattcactcggccatgggggcagggcatctctgcgtgccgcatcaattgatcgattacacctatggccgcgcgcatacctttttcgaaggggatatcgagcacgtcacccatgtcgacttcagctacccctacgatgagccgttgcgccagcgtctgattaccggcctggccgccgagggttttctgttcagcagtcatggcgtctatggttgtacgcaaggtccacggctggagacggtggccgaaatcgccaggatggagcgcgacggttgcgacatcgtcggtatgacgggcatgcccgaggcggtcctggctcgcgagctcgaattgccgtacgcctgcctggcgctggtggtcaatcctgcggccggcaagacccagggaatcattaccatggcggagatcgaggccgctctggcggagggcatcgtcaagacacgcgccgtgctggcgcgtgcgcttgctggctgatccgtccagccgacggcaggcggttcggagcggtttgcgacggccattggcgacgacggcaagggcatgaaaagtcgctgctatttttcgccgaacacccattgcaggcagtttgccgcttgctacacttggccgtcctctggagtatcggaatgccttgccacgcaactataagaagaatgacgaaagcggtggttttgctgggtttgctgtccgcaatcgctgggtgttcgacctggttcagcagcgatttccaagatccccgcgtccagctcaccgatgtcgaaatcatcaaggccaggcttctcgaacagcagttcatgctgcggtttcgaatcgagaatcccaatgagcagagtttgccggttcgcgggctcgtctacagggtccatctcaacgacatcgaactggcgagcggtgagtccagtggctgggccacggtgcccgcacatggctccgagtactatgaggtgccggttcagaccaacctctggcggcacatgaaatacatcgtacggctgttggagaagccggaccggcccatctcctatcgtctggaaggtgagttgaaaacgggtctactggctggacggcgcgtgcacatcgccaccaatggcgagataattcccggcaactttattccggagtagcgacatcgatgaatcacgacacccacgtacacggtcccgattgcaatcacgatcacgaccatgcgcatcatgaccacgtccacggtccgcattgcaaccacagccatgatccggtgcgcaatccgctgaaggatgtcggccgtaacgatccttgcccctgtggcagccagaagaaattcaagaagtgccacggagcctgatccgctcatgacaccgctcgccgtcgcgctgctcgtcgccggtttgctgctgattgctgcgctggccgcctatgcgctgcatttgtggcgcaaggtctggcacagggagcaggcattggccgagcagcaggcgcagcaacatgccgccctcgcggccgatttgcgggtgcttgccagcagtcttctcgacgaacaggtaccgctgatcgagggcgcgatacggatcaaggtcctgttggacaattacgattccaacctgggccaggatccgcgctgccaggtctttcaggtcctgttcgaggccaccgaacaggtacccacgcattccgcctggaaggcgctggataaaaccgaacgacgccgtcacgaagccaacttcagtgcgctggagttgcagcataaggccgaggcccgtcgttcggcccgctggcttctcgacgaagccttgccaaagaatcgcgaagccgcctgagtacggcggcgccgtctaccaatctctgtccttttctgtccaatagtgccccgtctgcaaggagccgttgatgtcgttgcgtctgccgttcgttctgcctcgtctgaccctcggcgctgcgttagtcgctggcgcgcttgcgggttgtcagccctatctggacagtcgctacgctgacagcctgccgccagcacagggcgtccaggcgattaccggtctggacaagagcgtgagtatccggcgcaacgcgctgggcgtgccgctgatcgagaccgcgacgttccacgatgccttgtttggtctgggctacgtgcacgcgaccgatcgtctgagccagatggtcagcctgcgcctcatggccgaaggccggctggcggaaatggccggcccgggtgtgctggagatcgaccgcttcatgcgtgcggcgaacctgcgtcaaagcgctgcgttgctgtatcgggagagctcgccgcgcatgaagcgcttcttcgaggtctacgcgcggggcgtgaatgcctacctgttccgtcatcgcgacaagttgccgatggatctggcggccgccggttacacgcccgagtactggaaacccgaagattcggtactggtgttctgcctgttgaattttggcctggcggtcaatcttcaggaagaaatagcgtcgctggtcatggcgcagaaggtgggcagcgacagccttgcctggttgctgcccacctatcccgatgaaccgcttccattcgccgaggcggacaagctgaagggcctgaagctgggcggagagatacccgggcttgccgcgctcgacagcgcggctgcgcaggtggcttcgctgaacatgctgggtgtggccgcttccaacaactgggcggtatccggcagcaacacccgcagcggcaagccgctgatggccaacgacacgcacctcccattgtcgatgccctcgtattggaatttcgtgcagatacgctccccgaagttccaggctgcaggggtgaccatcgcaggcgtgcccgccgtggttgccggcttcaatggcaagctgggttggggcatgaccatggtgatgggcgacacccaggatctgttcctcgagcaggtgcgccgcgaaggcggacgtctgatgtatctggccgacggcaagtgggtgccggcacgtgagcgccatgagacctttttcatcaagggtgagcggccgatccgcgaaacggtctacgagacccgtaacggccccttgctcaacagcgtgctgggcgaacgcaagcatcccatgcagccgctgcagctgagcagcggctacgggctggcgttgaaaacgatccagttcgaagccgaccagtcgctcgatgcgttcttcgacctgagccgcgcccaatcggtggatgaggccttcgaggcgagccgtgagatccgcgcggcggcgctgaatatcgtctttgccgaccagcagggcatcggctggcaagtgaccggacgctacccgaaccgccgtgaaggcctgggattggtgccctcgccgggctggaacggtcaatacgactgggatggcttcgccgatcccatgctgcacccctatgaccaggacccggcgcaaggctggctggcaacggccaatcagcgcacggtacccaagggctatggcatgcagctgtccaactcctggttctacccggagcgggccgaacgtatcggtcagttgctggctcatggcaaacaggacagccgcagtgccatggccatgcagtacgaccagacgacgaccttttccaccaagctgaaagcgatgttcgaggcgccaggcatggccgagccgctgcgtgcggccatcgatgcccttgccgaacctcagcgagggcgagcacgcgaggggctgtcacggctgctgagcgtcgatggcaagctcagtgcggattccgccgacgcggcgctgtatgaagccttcctcatggagtccgcgcgccagacgttcctggacgagctgggacccgaagacagcgcggcgtggaaggcgctcgtcgagacggcgaacacctcctattccgcgcaggccgatcatctgctggcccgcgacgacagcccgttctgggatgacctgagcactccacagcgagaagacaagccggccatactggcgcgctccctcgccgcggcgatcagccgtatggaggcttcgcagggcactgatcgcaacgcctggcgctggggcaaattgcacacctacacctggcagaccggcagcacccagctggcgcctcatctgcccgccagccagcgcgccggcatcaatgccatcagcggctatctggatcgcggaccctacgcggcaggcggtgaccacagcaccctcaacgtatcggcctaccgctggggtgacaatttcgatacctggctgatcccagcgatgcgcatcgtcgtcgacttcgggcgcgacgagccgatgatcgggctcaacagctccggccaatccggcaacccggccagcccgcattatgccgacggcatcgaggcctggttgaagggcgattacatgagctttccgttccagccccaaaatctggacaaggtttacggtacccagcgcttgctactcacgccggcgcgcccgtaatcgtatggccgatggcgacgtgagccttcctgagcgcatcgggttggctttcgtcgtcggcccgccgaggcttggttgctcaagcttcaagtggcgccggaggcgtgaagagattcgccttgccgaagcagcccagctgagcgcgtaatgcgtcgctgaaagcccgcgccgagcgagctagcgctctgcccgcgacacttccactacggtaatcgaagcaggatccgggtagtgccagcgcacgtccacatcccagaggcgggtgccgtagcgacggtctggagcgggcgtctggtaggccggtcgtgggtcctgcgccaggcactgttcgatcagcgcctgcaagggttcctcgagccgaatcgcctcgcgacggacctgctccaggctcgtctcggtccagtggacggcgatgggttcgggtgcggcggccgccaggtcattgcgtgcctcggcgacgctgtcggcgtaggggacataaggcttgatgtccagcaccggcgtgccatccagcaggtcgatccccgatagatgaagacggccgggctcgatccgctcgagcctgaccactgactgaccgatgccgttggggcggtgggtcgagcgggtcgcaaacacaccgaccatgcggttgccgcccagacgcggcgggcggactcgcaggcggggctcggcctcgagtgcctggtggaacatgaacagcagccagacatgactcacctgctcgagcccctccaacgcgtgcgcctggtcgaaaggaggatgcaactccagaacgccccgcgctgccggcgccagctgcggttggcgcggaatggcgaacttttccttgaaacaggatcggacgacgccgataggggtgacggaataagacatatcgtggccgcggtgtgaaacgtgggcggccatcttacctgtagtcgtggcgggttcgatgatcgaggccgcagtcgcgttgctgtgcaggtgcgctttggcggggcgttgcatgcatttgtacaatagcggcccgtttcgtgccttgctgatggctctaagtgcaaaggcaagcgcatataggcgttgcagcgcgctgccgggtagcgagtgggggcgggctccggcaacccgacaggtcactgatgacggatctggcgcgccatcgatccgagaaagcgcggttcaatggatatttgccacggctcggtgcgtccgatgacgacacgccctcaagagatgtccttatgtttcagaccctgaaagacgaagcctttctcgtcgccgcgctcgtggtggcgggacttgcctatagcctcgagggctatctcgttcacgatggccgggtgatagcgatggcggctacggctgttctggtgctgaccatcgtgctggcgtcggtgcgggtggcgcaccatgccgagatccttgccgaaaaggtcggcgatccctatggcaccatgatcctcaccctgtcggcggtgctcgtggaggtggtgatactcggcatcatgatgtcccacgagccatcgccaacgctggtgcgcgacaccatctatgcggcggtgatgctcgatctcaacggtattctcggcctcgcggcgctgctaggcgggttgcgccacggcgaacagccctacaacgacgattcggctcgcacctacagcgtgatgatcctgacggccatgggcgtatcgatggtggtgccggaattcatcccgcgcgacgactggcgcatgtattcggcgttcaccatcggcgccatgctgttgctttacggcgttttcctgcgcatgcaggtcggcgcgcacagctactttttcagctacagctatccggagaagcgcaaacgcaagaagcagccggacgccgagcacccgccgaccagtcgcagccgttcgatcatattgctctgcgtcggcgtggtgctgatcggtgccctggccgaggtgatgtcgcagaccttgagcgtcggcctgaagggcagcggggcgccgccgatgctcgcggcgctggtggttgcagcgatttcggccagcccggaaattctcacggctctgcgcgcggcactggccaatcgcatgcaatcggtggtgaacatcgccctcggcgcctcgttgtcgacggtcatcctcaccgtgccggtcatggaagcgctggcgctgtatagtggccaaccgtttcagatggcgatgaccccggtgcagacggtgatggttttcatcaccctgatcgtcgcggccatcaacctcaacgacggcgagaccaacgcgatcgagggcatgacccacttcgtgctcttcgccactttcatcatgctttcgctgatcgggctctgaagcccgtcagcgtgacggattttcatggacgtacgcatctacctcgccggccctggcgtgttccgcgccgatgcgctcgagcatggcgagcgactcaaggcactctgcgccgagttcggcttcatcgggttgtatccactggacaagcaggtgccgcgccatatcgtcggcgcacgcgagcaagcggcctggatctaccaggccaatctcgacttgttggagcaggccgatgcggtgatcgccgatctgaacttcttccgcggcggcgaaccggacagcggtaccagcttcgaagtcggctatgccgtggcgcgtggcaagccggtcgtgggctatctggagggggcgggcagctatgccgagcgcctacagcagcgctttgcgcacctgtgcggagagcccggcttcgactgcgacgggctgctactggaagccttcgatctgccgttgaacctgatgctggccgtgccgtcgcaactggtcgtcggcggccctcgggaggcgatgcgctgcctggctgaggctcagggagcgtcgctaggcccgccgggcggatgaagctgctgaatcggtttggtgggggcgcttcgggcatcacgtcggcggagtcaggccgcaacctttgaggatgacccggatcagcgtctcggtgccgcgtgcgaagtcgtccttggtcacccggcgctgacccgtgatgcgtcggatttggtcggagaaatcggcgtagtgctgggtgctgctccagatcaggaagatcaggtgcatgggatcgatcggatccatcttgcccgcatcgctccaggcttgcagcaccgccgcgcgaccgcgaaaccattcgcgatagtcctcattgaaatgctccgagaggcattcgcagccactgatgacttccatggcgaagatcttcgaggcctgcggctgcttgcgggagaactccatcttggtacggatgtaggcggtcagtgcggtagccgggtcgtcctcgacggtgaggttgtcgaaagcgttgtcccagagctcgaggatgtgccgcatcacctcgacgtaaagccccagcttgctggtgaagtagtagtgcagattggccttgggcagcgcggcacgcagggcgatcgcgttcatgctcgtccccttgtagccgtagcgggcgaactcttccgcggccgccgagaggatcaattcctcgttcttctggcgaatcttgccggtgcgtttgccggcgatgggcgtctgggtgagcgtggcgtcgaaggtattcatggtccgttccctgtgctggcgacatctcaggtccgatgcgcttcctaatgctagcgtaggcggctgcggctgattttcctcacggcagaaaccaacggccgctcgggttacggcgcggtgcgggccgcatgccccccatggctgtatttaacggcttccgttttctgccttgccaaccggccgccagcgcggactggacatcttcacagcctatggcagagcttggacggctctgcctgacgggctgcccctcagatggtctcggcccagagatcgtactcgtcggcgttggttacccggacccagaccttgtcgccgggctgcaacggctgttcgctgtcgacatacaccatgccgtcgatttccggggcatcggcgtaggagcgaccaatcgcgccgtcttcatcgacctcgtcgatcagtacttcgatttcctgaccaatcttgcgctccaggcgggcggcgctgatcgcctgctggtgggccatgaagcgatcccagcgctcctgcttgacctcgtccggtaccggctccaggcccagcgcctcggctggcgcgccctcgaccggggagtactggaagcaaccgacgcggtccagctgcgcctcggtgagccagtcgagcaggtactggaagtcctcctcggtctcgccggggaagccaacgatgaaggtcgagcggatggtcagttgcgggcagatctcgcgccacttcttgatgcgcgccagggtcttgtcctcgaaggccggacgcttcatggccttgagcactttcgggctggcgtgctggaacggaatgtccaggtagggcagcagcttgccctcggccatcagcggaatcacatcgtcgacgttcgggtagggatagacgtaatgcagacgcacccatacgcccatactcgacagcgcctggcagagttccagcatgcgcgtcttgaccggttggccgttccagaagtcggtcttgtacttcatgtcgacaccgtaggcgctggtgtcctgggaaatcaccaggatttccttgaccccggccttgaccagacgctcggcctcactgagcacatcgcccaccgggcggctgaccagcttgccgcgcatggaggggatgatgcagaagctgcaggtgtggttgcagccttcggatattttcagataggcgtaatggcgcggggtcagcttgatgccctgtggcggcaccaggtcgacgaagggatcgtgatcgatgttcggcggcaccacttcatgtacggcgttaaccacctgctcgtactgctgcgggccggtgaccgccagcacgctggggtggacgttgcggatgctgtcttcggccacgcccatgcagccggtgacgatcaccttgccgttctcggcgatggcttcaccgatggcatccagcgattcggccttggcgctgtcgatgaaaccgcaggtgttgaccaccaccacgtcggcgtcctgataggtgggcacgatctggtaaccctccatgcgcagctgcgtcaggatgcgttcggagtcgacggttgccttggggcaacccaagctgacgaacccgactgttggcgttttgctcatcgacaatgacctcggaacagcgcatgaaaaaggcgcgcgagtatacagagctggatattttttagccatgtcggccgtcgtatgtgcgagcggctcgggagcgtcccgttatacgccagtcgggcaggtggggtgttgtcgacgcggctggggacgctcatgcgcgccgtgctacaggctcagttcgagcagcgccggttggtcttccgggccggtgccatggcgatattcgctcggggtgcagcccaccaattgcttgaatgccctggcgaaataggacgggtcgcgaaagcccgcctcatagccgatcgtggtgatcggcatctgcgtgttgtccagccgctccttggcgaactccaggcgctttccgaggatgtactccaggtagcaaacgccgtggacatccttgaacagccggctgaagcgcgaaggggtcatcccgcagagccgtgccagcgccttctgatcgaggctctcgcgaaagtgctggtcgatgtactgcagggcattgctgagcgactgatgtttctggtgctcggttgtcaggcggatgctgggtggcaggtcgggaaagtgctcgctcagcgtcttggtggcgccacgctggggctgctggcgcagctcgaccaaccgctttagcgcctggcgatagcggcacagctcggcgtccgccagcgggagggtgacgtactcccagacccccgagcgcatcgcccacaccgccagttcctctgaatgctgcatggtgaacatgctgatggggatcgagggcgcggcccgtttgatcttcagcagctggttcagaccgagcgcatcggggcgatcgaaatgcatgcagatcatgtcgatccggcgagtctcggcggtgtccacgacgctgcaactgtgcaccagacgacactcgctgaacacctgaaagcgcgccatcagcgcctcggtgccgccgtcgtgggtcaggtcgagccatagaagcaagggtccatcctgcgtattggccatcagcgcgtacctgctctgcggggtattcacacagtattggcaattggccagcaccaataagaatagattctgctaagcgaggcggtgatagccctttgctgttatgacgcgtctcggcagccgccgcgatggtcgatgtggtcctgcccgtcagcgctgagcgcgccgctgtcgctggcgctgaaaaaattgagtcctagcaacgcgcaacagagtcctaacgcccgcccgtgtccgctgactagtgtttacctcgagcgtcgcaggagcgtcgcccgccgtgaaaacaaccactgtcgagtgaggtgagcgagatgaccattcaaaccatcaggaccgcaatgctgaagttcgccaaggacgaagacggactgacgatcgtggaatacgccgtggcgggaggcctgatcaccgctgccgtggccgcgatgttcgtcagccttggcggggaagtgaacaccaggatcacggcgctgtgtgcggccgtcaaaggcagtgcgtgctagtgagccgctcggccgtgcgcgtggagtcgccatgatgctttcggcgcgggaagtctcgctgatcgttctgttcgggctgctggccgttgcggtggttggcgatctgcgccgtcaccgcatccccaacacgctggtgttgacggggatggcgctggggttggccgggcaaatggtagtgggcggtgtggccggcctgatcaacggtgtgtcgggcatggcggttgggttcggcctgttcttgctgctttacgtcgtgggcggcatggccgccggcgacgtcaagctgatggcgatggtcggtgccttcttcacgccgcagcaagcgctggtgattaccgcggcgagcctgatcgctggtgccttatgcgggctgacgttggtgctctggcacggccaggtccggctgacccttgggcgctacggcttgatgctgcgaaccttcgcctatctcgcgccaggggacggcgaagttgccggcaagccgttcccttacgccatcgcgattttcctcggaaccctggccggcagcctgtggttccacttcgaaccctagcgcgggaggccgtcatgcatgccatcagcgacagcgacgcctacccgagcgaacgcgaggccgtgcagcacctggcccctcagccgcgcaatatcgccgagaccggcctgagcgatcagctgctcgccgatcttctgtgcaagcacctgcacgaggccggcccgctggatctgtcgcggttggcggagcgcctgacactgcccggggcggtcctggaggaggtgctgggcctgctgcgcaaggacgggcgtatcgaggtgctgggtcaacacaacggccagggcctgcgctatggcttgaccgagcgcggccgcgacgccgcccgcgacgcattggcgcgcagcggttacatcggcgccgcgccatttccggtcagcacctaccgctcgctggtcaaggtgcaaaccgttcatcacgcccgtgtgagcgccgaaaagatgcgttcggtgtacagcggggtggtgcttgccgagggcctgctcgaccagctcggcgtggcggtcaattccggccgcgccatcatgatctacggcccggccggtaccggtaagacctacatcagcgggcgcctggtacgcctgttcaacgaggcggtctgggtgccctatgcgatcgccgtgaacgatgcggtggtggaaatctacgatccgcagattcatcagcggctggacgaccgcgatcgctacaagagcctgctgttcagcgagggcatcgaccgccgcctgctctgctgcatgcgcccgcaggtggtctccggtggcgagctcggcatggagcaattggacgtgctctacgacccgttcagccgccgctatcaggcgccgctgcacatcaaggcgagcaacggcctgttcatcatcgaagacctcggccgccatcggatgtcgccgaccgaactgctcaatcgctggatcgtgccgatggaggacaagcgcgacgccttgcacctgggcggcggttatcaatgtgtgctgccgttcgacacggtgctggtgttctcgaccaacctcaatccgctggagctggccgacgaagcctttctccggcgcatcggctacaagctgcatttcagctacctcaagccggccgagtacgagcggatttggcggcaggagtgcgagcgtctggccgtgcctttcgacccgcagctgctgcgcttcgtgctgcgcgaactctacgaagcggagggcatgccgctggtgccttgccatccgcgcgatctgttgggcatggcgatggaccgccagcgctacaccggtcgaagcgggccgctggccccggacgacctgctttgggcctggcgcgcctacttcgttcagctggaatttctcggataaggaggcacggcgatgggctctcggactctcacgctggttgcactgtcgctttcgctaggactcggagcggtctggatggcgaacaactggctcagcgccagacttgatgccgggcctgacgacgattcgcggagcgtcgtgatcgcgaccaccgaaatccccttcggccatagggtcgatgcccagtcggtggccctggtgcgcatgccccgcggcaccgtaccggacgattcattcgagaccaccgaaagcgtggtcggcaagatcgccaccttcggcctgttgcgcggcgacgtgctgcgcggtgcccgtctggccgagcatctggggggcagcaccctggcgtcgctgatcgccgccgacaagcgcgcggtgtcggtgcgtgtcgatgacgtggtcggggtcggcggttttctcctgcccggcaaccgggtcgatgttctggccaccaagcgcatgggcaacggcgacgaagcgcgggccaccaccatcctcgaggatctgcgggtgctggccgtcgaccagaccgcgagtaccgacaagacccaaccggtagtggtccgtgccgtcaccctggaaatggcctccgatgaagcggaggtgctggtcaaggcgatggccgagggccgtctgcaactggcgctgcgcaatcccctggataacagcaaacggcccgctgaggcaccgctaaagccggtcgtcgccgtggccaagcccgtggtgcgccgcgcgccggtggatcctggcgtgacggtgatccgcggaacccaggtgaacttgaccaaagtgggactgtaggcgaacgacggcggccaccggcgtgccggggccatgctggccggataccgaggagatggacatgaaaggcatgtgcagattggggtgcttcgcgctggtgctggtcggcgtgaccacgctttccgagctggcgacggcggcggaggcggtgtcgacggtggtcgccgccccggtggccaatatcagcgacatccaggtccccctctacaaatcccgggtgctgaccacccgcacggcggtcaagcgcatctcggtcggcaacccggagatcgccgacatcctgatcaccagcccgacgcagctctatttgctcggccgctcgctgggcagcaccaacgtattgatgtgggatggcaacaaccgcctgatcgacagcctggacctggaagtggtgcatgacctcagcgggctcaagggcaagctgcatcaggtattgcccaacgagcggatcgaggtgttcagtgcccagggcgcgctggtgctgcgtgggcaggtcagcagtgcagcggtgatggacagtgcgctcaagctggcgggcccctatgccgaccaggcggcggtcaagcccgaagggcagggcgcggcgccggctgccgcgccgtcgcagcagccgctgcaactgatcaacctgctcagcatcggcggcagccagcaggtaatgctggaggtcaaggtcgccgaaatgcagcgcaacctgttcaagaaccttaacgtccgcttcaacgcgctggacttcggctcgtccggccgctggtccggcggcggcttcaacaacggtgcaggcctggggttcgacaaggatgggctggtcaatccgaccacgctgttcggggatggcaagggcatcttcggccaattcctgtcggataacttcctcttcaacgtggtgctcgaggcagccaaggacaatggttctgccaaggtgctcgccgagccgacgctgaccacgctgaccgggcagcaggcggagttcatctccggtggcgaatttccggtgccgatcacggacgacgacggcatcaccatcgagttcaaggaattcggggtcggggtcaagttcctgcccgtggtactcgattccgggcgcatcaatctgaacctgaatgtgtcggtaagtgaactttccaacgccaacgcgctggtgctggacaccggcctggaaagcatcctcggcaacggcgtgaaccagctgatcccgtcgctgaccaagcgcagcgcgcagtcgaccgtcgagctcggcaacggccagaccatcgccattgccggcctgataagcgagaacacccgcgacttcgtcagccgctttcccggcctgggcgacgtaccggtgctggggcagctgtttcgcagccagcaattcatccatggcgaaaccgagctggtgatcctggtcacgccgcacctggcgcagccggtggacgcggcagcggtacggctaccgaccgaacgcttcgtcgaacccagcgatgcggccttctacctgctgggcaagaccaagggcgacaccgatgggcgggccgtgccggtcagcctgggcgtcagcgaaggccgcttcggccacgacctcaactaagcggagccgcaatcatgaagaagctgccatgtgcctgtctgctcgccttgctggccggctgcattccctatcaggaaggtcgtgtcggcccgctgggcagctcggtcaacgcaaccctctaccagcagatcgccgacaagaacgtcgcccgtgcgccaggcaccgcgtcgccgtcggcaggggtcgacgggccgttggtcgagcaggcgctcgagggctaccggggcgcgagcggcgaggcgaacccgatcgcgcagccgatccagatcaacgttggaaagtgagatcgcgctcatgaacgccaatcgcatggctctctcggcacgtcatcgccagaccggctcggtcatggtgctgatcgtcgtggcgctggcagcgatgttgctgatggcggccctggcgctcgacggcgggcacatgctggtgaacaagacccgcttgcaaaatgcggtggatgccgcagcgctcagcggcgccaagacgctgcaacaggtgatgggctcgggcaatgagggcagcctgacgcagacagcggcccgggataccttccggcgcaatgccgaagcggccggcaacggcgaactgttgagcgcgcttggcggcgacttgtcgggcgtggtgcgcgtcgatctggcggccagcgtctatgggccgttctcctttcccggcccggcggatgcgcgctacgtacgcgtcaccgtcgcgcagttaccgctggcaggcttcttctggggcatgctgcaggcgttcggcaacgccgcggacaaggccgtggctgctgtcgccaccgcggggccgagcccggccagcccgtgcaacatcgcgccgctgatggtgtgtggcaaccccgggcagcatgagccgagcgccgggttgttctggggttatcggctcggcgacctggaggtgctcaaaggcgcagccggcaacgcgtcgacggtggggcccggcaacttccagctgattcgtctgggtgacggcgctggcggcgcggacgtgcgccaggcgctggccggtgggatcgcgcagtgcaacagcgtcggcgacaccgtggaaaccgagcccggcaataccgtcggcccggtctcgcaaggcttcaacacccgtttcgggcgctacgccggtgccttggccaacagcgccagcgaatacccgccggacttcgtcaccgactacagcgctccgctgatgacctacaacgccaccacgggacaggccgagtaccaggggcaggtggtgagcgccaatggcgcagacctgtcgacgccgagcgccgcgctgttcgactacaacgactggcgccagcaggtcgccggctgcccggccggttgccggtcgggcggtgtgttcgagcggcgcatgctgaagatcgtgctgggcgattgcacagggggctccggtgggcagacatccgtaccggtcctggggttcgggtgcttcttcctggtccagccgctaccgaccgggtccggcggcgaggcgcagatcttcggccagttcgtcagtgactgcgaaggcgacaacgtgccggacatcaacccggtcaacgatggcggcccgcagatcatccagctgttcaagacctatatcgacaacaaccggacgccgagcagcgactcgtaggaggcggccatggcgcgcaacgaatatcgggcaaaggtccagcagcgaggtgtcgcgatggtcgagctggcgatcgcgctgccgttgctgctgttgctgttgctggccatcggcgaggtggcgcggttgctgttccagtacaacaccttgctccaggccagccgcgatgccagccggttcgtcgcggggcaggcctggaaccataccctgggccgtatagagctgaccgccgagctgcagcagcaggcccgttcgctggccgtgtacggggtgcccgtcgcaccggccggcagccagccgctggtgagcaacctgaaccccgcccaggtggcggtcagtgccctggggagcgatcacgtccaggtcagcatcagctatccattccagccgctcatcggtggcggtttgcccgacgtgggccatggcgcaacgccactgacattcccgctggtggccaccagcgtgatgagggcgctgtgatgaacgccaaacgcatgcgcggcgtgtatgtggtggagttcgccatcgtcggcctgctgttgttcacgctgctgttcggcgtgctggaaatgggccggctgctgtttaccgtcaacgcgctgaacgaaacggtacgccgcggcgcccgcctggccgcggtgtgtgacatccaggagccgcgcatcctgcgccgggcgattttcaacgccgccgaagatgccggcgccagcagcctgatcgccgcgctgaccaccgcacagctgacgctggtctacctcgacggcaacggcaatcccatcgccagccccggttcaagcggcgcggcaggtttcggcgcgatccgctatgtgcagctgcgcgtggaaaacttcaccttcactccgcttattcccggcttgaacggtgtgatcaccttgccgccgttcttatcgaccctgccgcgcgaaagcctcgggcgtcatgccgagccagacgtggttccggagatcacaccatgctgaataccaccgaaacctcgcccgtccccgcggttggccggcaagcgctgcgggcgttgatcagcagccgcgatgcgactgccctgacgcagctcaaggggctggcgcagcaattgactggctggcaggtcggcactcggctggtcaacaacggccacaccgatccgctgtacgggctggagcaattgcccgacctgctgctgttgcatgtcagcccgttgtggcgcgaagaactggccacgctccagcagcgtccggcccagcagcgtccggcgcttctggtctgcggcccgcaggatccggagtgcatgcgccaggcgatgcaggccggcgcgcgtgacttcctgccggagccggtggtcgcgcaggagttgctcgccgcgatcggccggatggcgctggagtcgcgcgacgaccaggcgccgggcggcaagctggtcgcggtgatcaatgccaagggcgggtccggcgcgaccatgctggcgtgcaatctcgcgcacagcctgagcgcgccgggccagcgtaccttgctattggacctggacctgcaatttggcagcgtcgctcattgcctggacgtacagccgacccacagccacatggatgtcttgcagcggatcgacgatctcgatggcgtcgcgctgcacggcttctgcagtcacttcagtccgacgctcgacgtgctgggcggccgtgccagcgaactgtgcctgacgcaggacgtccagctggagcagctcgaagggctgctcagcctggcgcgcgccaactacgactgggtcgtggggggggggggcgggggcggggggccccccccccccccccccccccgccaaaga

SEQ ID NO: 21 - DNA, 195593 bp, Pseudomonas sp.
accgatccacgcgttcatcgagcccggtgcaacccggtggtggatgtaaaaagcgacatccaccctacggagctgcgctaccgccgtagggtgggcttcagcccgccagctaccgtattccgcagggcaggatgaaaagcgccgctcggttccagctcaggccttacgagctgctaggcgctgtagtttttcaggccttcttgtgcaccgaaacaccggccgcgtaggtttccttcacagcgcggtcgtcgccgaggatggtcagggcgaagagtttttcctccagcgtccgggcctggcgcaggcggtagtcgatcagcggcgtggccttgtagtcgagcaccacgaaatcggcatccttgcccggctgcaggttgccgatgcagtcgtccaggtagagcgcgcgggcgccgcccagggtggccaggtacagcgacttgaacgggtcgagcttcttgccctgcagttgcatcaccttgtacgcctcgttcagcgattgcagctgcgagaagctggtgccggcaccgacgtcggtgcccagcccgacgcgcacgccgaagccttcgaccttctccaggtcgaacaggccgctgccgaggaataggttggaggtcgggcagaacgccacggccgaaccggtttcgcccaggcgctggcattcctcgtcgcacaggtgcacgccgtgggcgaacaccgagcgcgcgccgatcaggccgtggtggtcatagacatccagatagcccttgcgctcggggaacagctcgcgcacccattcgatctccttgcggttctcggacaggtgggtgtgcatgtaaaggtccgggtattccttgaacagctggccggccagggcgagctgctcgggcgtgctggtgggcgcgaagcgcggtgtcacggcgtaatgcaggcggcccttgccgtgccagcgctcgatcagctcgcggctgtcggcgtagcccgactcggcggtgtcggtgaggtagtccggcgcattgcggtccatcagcactttgccggcgaccatccgcaggttgcgtttctcgcaggcctcgaaaaaggcgtccaccgattccttatgtacgctgccgaataccagtgcggtggtggtgccgttgcgtagcagttcgttcagaaagacttcggccacctcgcccgcgtgggcctcgtcggcgaaggcgcgttcggtggggaaggtgtaggtctcgagccagtccagcagttgctccccataggaggcgatcatgccggtttgcgggtaatggatgtgggtgtcgatgaaaccgggggtgatcagcgcgtcggggtattcgatcacctcggtgccggttgccaggtttggaagaaggtcggccgcggcgccgatgcgcgcgatcttgccgtcctcgaccaccagcaggccgtcttcgaaatactcatgggagcgctcgatgcccacctcgcgtgggtcggcgaggcagtggagcagggcggcacggtaggctttggtgctagacatgggttctctctataacgcagacgtgggagcggtcggggacactggtcttgaccgcgattcggctcggtgcggcgggctcagggttcaggctggcgtccgtggccgcttcacactttgtttttctggttcaggcgctgcgttggcaggcgcctctgctggggtaggcccgcctcgacgggccagtggatccggccggcagcgattgcgttctgtaggcaatccattcgcggtcaagaccgctcctacaggttcgactccgccatgaggctggcactgactcaggcttcggtgggcatgatgtgtcctcgttcatgcattgtgggaacggtcggcgacgcctagtctcgaacgcgattttccgtagcgcggacgtgggagcggtcttgaccgcgattggctcggtgcgacgtcgtcaggtgccattcccaatcgagagtaggttacaaccgctcccacagtggtgtttcagccgcgccgtgaggcgggcaccagcatcggcaccggcttttcgccgtccgcggctttctcaccgaagctggcgttgtaggtggcgatcacgtcgccggcgatcgacaccgcgatctcgaccggcaacttgcccttcacctcggcgatgcccatcgggcaacgcatgcgctgcacggtctccggctggaagccgcgatcgcgtaggcggtgttcgaacttggcgcgcttgctcttcgaaccgatcagcccgtagtaggtgaaatcgttacgttcgaggatggccgcggtcagttccaggtcgagctggtggttgtgggtcatgacgatgaagtagctgccggcaggcatctctgccacttcatcgaccacctcgtcgttgactacctttcccaccccggccgggatatgcgccgggaactcgctttcacgcgaatcgatccagcgcactttgcacggcaggctggcgagtaacggcaccagggcgcggcccacatgaccggcgccgaacaccgcgatatgcgcctgcggctggcccatgggctcgaacagcaacacggtggccccgccgcagcactggccgaggctggcgccgagggagaagcgttccagccgcgtatcacgcacgcggttttccagcatctcgcgggcaatcgcctgcgccttgtattccagatgaccgccgccaatggtgtcgtagaggcgctcgcgactgacgaccatcttcgagccggcattgcgcggcgtcgagcctcgctcctcgatgatggtcaccagtacgcagggttcgccttgttgttgcaggtcagcgagcgcgtcaatccagctattcatctcgttctccgatgccgcgagggcatgcgcgtgatcgtcttcggtggccgggtcgcaagcagagcccctacaggaggccgtccggtgtaggagcaggccctgcctgcgaccgctggttgtcaccagtgaggccgcgatgcgtttgcaccggggccatgttgtccggcgtggtcagtaggcgccgttcaactcacctttcacttcatcgcctgggtcgcaagcagagcttgctcctacaggttgctgtggctggttgtaggagcaggctctgcctgcgaccgctgcagatgcgggatgcagcactgcgatgcgtcaggccggcgtggtttccgttgcctcgacagtggtggccgtccgcttcagcttgcgcatctgttccacaccccacagtacccgctcgggcgtcgccggggcgtcgatcttcggctgggccttgtagtccgccaggctggcgacggcatccttgatcgcgcaccagaccgagatgccgagcatgaacggcggctcaccaacggccttggagtggaacaccgtgtcttctgggttcttgcggttttccaccagcttgacccgcagatccagcggcatgtccgccaccgccggtaccttgtagctggccggcccgctggtcatcagcttgcccttgtcattccacaccagctcttccatggtcagccagcccatgccctggacgaagccgccctctacctggccgatatcgatggccgggttcagcgaggcgccgacgtcatgcaggatgtcgctgcgcagcatcttgtactcgccggtcagggtgtcgacgatcacctccgagcacgccgcaccgtaggcgaagtagtagaacggccggccgcgcgcctggctgcggtcgtaatagatcttcggcgtgcggtagaagccggtggacgacagcgatacctggccgaaataggcctgctggatcagctcgtcgaacgacacgtactggtcgcgaatgcgcacctggccattcctgaattccacatcttcttcggtgacctggtagtgccgtgcggcgaattcgatcagccgttgcttgatggtctgcgccgcattctgcgcggccttgccgttgaggtcggcgccgctggaggccgccgtcggcgaggtgttcggcaccttgtcggtgtttgtcgcggtgatctggatgcgcccgatgtcgacctggaacacctcggccaccacctgcgccaccttggtgttcagcccctggcccatctcggtgccaccgtggttcagatggatgctgccgtcggtatagacgtgcaccaacgcgccggcctggttgaggaagctggcggtgaagctgataccgaacttcaccggcgtcagcgccaggcctttcttcagcaccgggctcttggcattgaacgcgcgaatctcttcgcggcgcttcgcgtactcactgctggcctccagctcggcggtcatttcctcgagcatgttgtgctcgacggtctggtagtagggcgtgacgttgcgctcggtcttgccgtagtagttgcgcttgcgtacgtccagcggatccttgcccagttcgcgcgccaccgcatccatgatctcttcgatggcgaccatgccctgcgggccgccaaagccgcggtaggcggtgttggaggcgaggttggtcttgcagcggtgaccgttgatggtggcgtcgcccaggtaataggcgttgtcggagtggaacatggcgcggtcgacgatggagccggaaaggtcgggcgagtagccgcagttgccggccaggtcgatctcgatgccgtgcagcaggccgtcgtcatcgaagccgacgtcgtactcgacatagaagggatggcgcttgccggtcatggtcatgtcttccatgcgtggcaggcgcatcttggtcggccgaccggtcaggtgcgcgatcacggcgcacatgcacgcggggcctgcggcctgggtttccttgccgccgaagccgccacccatgcgacgcatgtcgatgacgatcttgttcatcgagacgccaagcacctcggcgaccagcttttgtacttcggtagggttctgcgtcgaggtgtagacgatcatgccgccatcctcggtaggcatcaccgaagaaacctgggtttccaggtagaagtgctcttgaccgccgatgtgcaggctaccttgcaaacgacgtggcgcagtggccagcgcgcctgacgaatcaccgcgcttgtgagtgtggctgtcgagcacgaaatgcttcttgcgcagtgcgtcgaccacgtcgatcaccggctccagatcttcgtactcgatgatcgcggccatggccgctttacgcgcggtttccagattgtcggcggcaacggcaatgaccggctgaccaacgaattcgaccttgccatcggccagcagcggatcaccgggcatgaccgcgccgatatccagctgacccggcacgtcctgtgcggtgatggcgatggcgacgccaggtacgttgtagcaaggggacgtgtcgatgcgcacgatccgggcgtgggcgcggtcgctcatgcgggcatagacgtgcagctggttagggaattccaggcggtcatcgacgtacaccgcctcgccggtgacgtgcttgggcgcgctgtcatgcttgacgctgcggccgacgccggtgaccaggtcctgcttgaacagggcggcgatttcctcttgcgatttggttggcttatgcataggaagtgaccctcgtctcgtacgccggcgcttgttgttcgtggaagcatttgcgcagcaggttctgggcgaccagcaggcggtattcgcggctggcacggaagtcggtcagtggcgtgaagtccttttccagcgcctcgcacgcgcgctcgatggtctcagcgttgaacggcgcgccgatgagtgcccgttcgcaggacaccgcgcgtttcggaatcgcggccatgccgccgaaggcgacgcgggcatcgtcgatcagcccatcttcgagcttcaggtcgaaggctgcgcaaacggcagagatgtcgtcgtccaggcgcttggacaccttgtaggcgcggaacagctggtttggctgggcgcgcggcacgatgatcttctcgatgaattcgccttgctcgcgagcggtgaccttgtagtcgatgaagtaatcctgcagcagcaaggtgcggctgttgttgcctttgcgcagcaccacttgggcgccgagggcgatcagcaagggtggcgaatcgccgatcggagaggcgttaccgatgttgccgcccagggtgccctggttgcggatctgcaaagaggcgaagcggtgcagcagttcgccgaaatccgggtattcctttgccagcacgtcgtaacaatcggtaagcggagtggccgcgccgatctcgatgcccttgtcggtgacctcgactttcttcatttcggcgatgtggccgacgtagatcattaccggcagttcgcggtggaactgggtgacttccagcgccagatcggtgccgccggcgagcaggcgcgcgtcggggttggcgctgtatatctcggccagatcgcccaccgtcaacggcgacaggcagcgcttgtcgccgctgttcagttcggcggtttcgtggggttcgatggctttcagttgagcaacggtttcggcttcgctggcgtcgaactggtccggctgcttgccgcagcaggcctgttcggcggcatccagaatcgggcggtagccggtgcagcggcagagattgccagccaaggcttcgtgggtgtcggccttgtcgaagccatccgccgatttctgcagggcgaacaggctcatgacgaagcccggcgtgcagaagccgcactgcgaaccgtggcagtcgaccatcgcctgctggacgctgtgcagctggcccttgtgcttcaggtcctcgacggtgatcaactgtttgccgtgcaaggcggagacgaaggtcaggcaggaattgagtgtgcggtagcgcaagcggtcgccatcgagctcgccgaccacgacggtgcaggcaccgcagtcaccggaagcgcagccttctttggtgccggacttgccgcggtattcacgcaggtattccagcacggtggtattcggatcgagtgtctgctcacggcgcagttctcgattgagtaggaactggatcaaggagggcctccggggagtttttgttctgggctctggtggtggaaattatccttatctgactttttggtcaacaaattcctgactcaaaagtcagctcgtcgacgagcgaagtttacgcagcaatgcgtgtgccgcttcggcttgttgttcatggatatgagtgtggcccagatgggccaggattgccccgcgcaggtagacgtaaggcttcggctaaagtgcgagcagactgttgtctgctgcaagggcgatccggtcaggcgtttcggcagaggcgggccaaacgcgtcgcccgaattatcagttcgtctggcgttggagtgcctacgctctctcggggatggtctacaaaaggtgctgcgatagccgctcgactatttttcccgccgaccaaaggtagcgtttgggccaacatccagccgacctccgcgagcaggaacggcagcagcaccaagctggcaccgtgagtaagggcatacagctgccagagtgaaaacaacaggcgacctgccgcatcgtagcgcccgaagcgcggacgtggatggcgaatccgcagcaccgcccagatacaaacgatgctgccaagcaggttggccatcaatacgtgcatcggagcgaaagccggcagtggatccactccgacttgcacggccactgccgataacgcttcatgcaagacagtaaaagaccagggcgtggcgaagggcgccgtgatcaggaggtcgtaccaggcgcttgcaaggacgattcggcgatagcgagcggttttcatgagtggctctcccgttgaggtgccaacagtctcaaccctggagtacgctctatggtcaaccctatttctggaatcaggtatatgcgcatcggtgagctcgcggccgaatctggactgagtcgtgacacgcttaggttttacgaggcgcgcgggcttatccgagctgtacgtagcggcaacgggtatcggcattaccctgccgaaacagtgcaaacgctgttttacattcgcaccgcgcagcgcctcggatttagtctgaccgagatcggtgaaaatctggatcgggtagcggacgcgcccgatccagaccagatggtcgaggctttgctgcttgaaaagctggcgaccatcgatgagcgcgtgagcgacttgcaggcgctgaggcagatgatcagcgagcgcatcgggttgccttgcccattgcgtggaaaggccgatacgcccgcttgaccccgtcaaccggcaatcagctcgcgtgccgcctggctgtggttggcgatcagtccggccacgtcgaggccttcgatctggccgtcgacgactcgccattggccacccaccatcacccggtcggcccggtcggcgccgcacagcagcaacgccgagatcgggtcgtggctaccggagaaacgcagttcgtctagcttgaatagcgccaggtcggcctgtttgccgacggccagttcgcccacgtcgccacgacccagtagccgtgccgaaccgcgcgtggcccagcccagcacccgctccggggtgatctgctcggcgccgtagcgcaggcgctggatatacagcgcctgccgggcttcgaggatcatgttggacgcatcgttggaggccgaaccgtccacgccgaggccgataggcgctcccgccgcttcgagcgccacggtcgggcaaatccctgaggccaggcgcatgttcgagctcgggcaatggcagatgccggtacccgcggcgccgagacgtgcgatctcgtcgtcgttgaagtggatcccgtgcgccagccaggtgcgctcggacagccagccgacgctgtccaggtagtcgacggtgcgcaggccgaagcgctgcaggcagaattcttcctcgtccagagtctcggccaggtgcgtgtgcagacgcacgtcgtggtgttcggctagcgccgcgctggcgcgcatgatttctggcgtgaccgagaacggcgagcagggcgccaggccgatctggatctgtgctccggctccgcgctcgtggtagcgcgcgatcagccgctcgctgtcctcgaggatcgcctcggccgtctgcacggtgtgttgcggtggcaggccgccatcagcttcgcccaggctcatggagccgcgtgtcagcatcgcgcgcatgcccagctcgcgcacggcctcgatctgcacgtcgatagcgttttccaggccgtccggaaacaggtagtgatggtccgccgcagtggtgcagcccgacagcagcagctcggcaagcgcgaccttgctggccagcgtcaggcggtcaggcgtcagacgcgcccagaccgggtagagtgtcttcagccatgggaacagcggctggttgaccacggggccccaggcgcgggtgagggtctggtagaagtggtggtgcgtgttgatcagccccggcagcacgacgtgctcgcgggcgtcgaaggtgctgtcgacgggggacgatggggattgcccggagccgagcagttcggcaatggcgccattttcgatcaccagcccgccgggggctgtttgatcgttggcggtgtagagagcgaggggattcttgatccagatacggctggcagtcatggccggcttctcctgagttgagttcagaaatgagccagctcagttatgccctgtctgctgatccaggggttcgtcgtgacgccctggtgggcgtcgggaatgacgcgacgtggagcacgataaaggctccgtccgtgcttgtcatccttttgcgcacgcgcatgaaggttgccatgcatgacctgcttttgtagaagggccgaccatagggctaggctttgggcaccgtgccggcggcattcgccgcgggtcgcggctcccacaaaaagcgcaccgccggcacaaagcggcggcgcacatgacagttctgtaggagccccgaccccggggcgaagcttttccggcgccgagttgacgctatccgccgcaggtcgcggctcccacaaaaaagcgaaaaccgaaggcggaacgcatagtcgtttcgtccagccttccagcgctttgcgtcgacttcaccctcccagataggcgtcgcggactttcgggttgaccaacagctcttcaccgctgccctgcatgacgatgtgaccgttctccagcacgtagccacgatcggccagcttgagcgcctggttggcgttctgctcgaccaggaagatggtcacgccatcttcacgcaactgctcgatgatctcgaagatctgctgaatgatgatcggcgccaggcccaacgagggctcgtcgagcagcagcagcttgggtttgctcatcagcgcgcgggcgatggcaagcatctgctgctcgccgccggacatggtgccgccgcgctgctggaaacgctccttcaggcgcgggaacagcaacagcaccttgtccagttgctcctgaaagtccgccttgttcgtgaagaacccgcccatggcgagattttcctcaacagtcaggcgggcaaagatgcgccgaccctcgggcaccacggcgatatccttgcgcatgatgtcgcaggtctgcctgccgaccagctcttcgccctcgaagcgaatgctgccttcggaggccatgggcgtgccgcagagcgtcatcagcagggtcgatttgccagcgccgttggcgccgatcagggtgacgatctcacccttgcggacttcgacgttgacgctgtgcagcgcctggatcttgccgtagaaggtcgagacgttttcgaaatacagcatggttacgcctctcccagataggctttgatcacgtccggattgtcgcggatctgctccggcgtaccgtccgccagcggacagccctggttgatcacgacgatatggtcggaaatgctcatgaccagcttcatgtcgtgctcgatgagcagcaccgtgacgccatgcttgtcccgcagcatgccgatcagcgccttcaggtcctcggtctccttcgggttcaagcctgctgccggctcgtcgagcatgaggatgcgcgggcgcgtcatcatgcagcgggcgatttccagacggcgttgctggccgtaggcgagggtgcccgcggggcggttggcgatatcggtcaggttgacctgctcgagccagtgcgcggcgaaatccatcgcctcgtgctcgctcttgcgaaaggccttggtcttcagcaggccggacaggaagttggtgttcagatgccggtgctgggcgaccaacaggttttccactgccgtcatgtccttgaacagacgaacgttctggaaagtacgcaccacgcccttgcgggcgatcttgtggccgggtaggccctggatcggttcgccgtcgagcaggatcttgccgtcggtgggctggtagaagccggtcaggcagttgaacaccgtggtcttgccggcgccgttggggccgatcatggagaccacctgcttttcatgtacggtcaggcctaccccgttgacggccaggaggccgccgaagcgcatggtcaggccgcttacttcgagaatcgggcggctcatcgcttcagctccaggtggggacgttgcatgggcagcaggccctgcggacgccagatcatcatcagcaccatcaaggcgccgaacatcagcatgcggtactcgctgaactcacgcatcagttcaggcagcaggatcatcacgatggcggcgagaatcaccccaagctgtgagcccatgccgcccagcaccacgatggcgaggatgatggccgattcgatgaaggtgaacgactccggtgacaccaagccctggcgcgcggcgaagaagctgccggcaaaaccggcgaaggtcgcgcccagggtaaaggccgagagcttgatcacggtggggttcatacccagcgcgcggcaggcgatctcgtcttcacgcagcgcttcccaggcgcggccgatgggcatgcgcagcagccggttgatcacgaacagcgtcaacagcaccagcagtacggcgatcaggtagaggaagatcaccttgttgatggagctgtaatcgagcccgaagaactcgtggaaggtctgcatgccctcgtcggcgcggcggtcgaacgacaggccgaacagcgtcggcttctcgatgccgctgatgccgttggggccgccggtcagccaggtcatgttacgcagcagcaggcgaatgatctcgccgaagcccagggtcacgatcgccaggtaatcgccgcgcaagcgcagcaccgggaagcccagcaggaaaccgaacagcgccgccatcgcaccggcaatgggcagtgccatccagaacccgaagccgtagtaatgcgagagcagcgcataggtgtaagcacccacggcgtagaaacccacatagcccaggtccagcagcccggccagaccgacgacgatgttcaggcccaggccgagcatcacgtagatcaggatcaacgtcgcgatgtccaccgcgccgcgcgaaccgaagaacggccataccagcgccagaacaatcagaccgatgatgatggcgcgctgggtagacggcagcgtgaggaaattgcccgcacccgcgggtaccgtcggcaggttgggactggcggcccagccggccgccaggtgatggcggaacagctgccagaagaacatggccacggcgcaggcggcgatgatccagaacgtcttggcatcgctgccatgcacttccaggcgaatgccgacggtggtgagcttcaggccgaataccgggacggcaacggcgaataccagcagagcactgaaaaaggcagtgcgaagattgcgagtcataccttttcaacctccggacggccgaggatgccggtcgggcggaacagcagcactagcaccagcaggctgaaggccaccacgtccttgtactgatcgccgaagatgtcggcgccgaaggcttcggcaacgcccagtaccaggccacccagcatggcgcccggaatactgccgatgccgccgagcaccgctgcggtgaaggccttgatgccggccaggaagccgatgtgcgggttgataacgccgtattgcatgctgatcagcaccgctgcgacggctgcgagcgccgcgccgatgacgaaggtcagggcgatgatgctgttggtattgatgcccagcaggttggccatcttcaggtcctcagcgcaggcgcggcaggcgcgacccaggcgtgagcgagagatgaacagggtcaggaccagcatggtgatgatggtgaccacgaagatcagcacctgcatgtaggaaatcaccacgccgttcatggcgctttcaccgaggatgaagttgcccggcatcaggttggggatcgccttgtccttggagtcttgcgacaacagcacgacgttctgcaggaagatcgacatgccgatcgcggagatcagcgggatcagccggttgctgccgcgtagcggtcggtaggcgacgcgctcgatgctgtaaccgtaggcgctggtgacgatcatggccgcggcgaaggcgccgatcatcaggattggcagggcatcgaggcccatcatgctcagcccgacaatggcgatgaaggccacgtaggagccgatcatgtacacctcgccatgggcgaagttgatcatgccgatgatgccgtagaccatcgtgtaaccgatggctatcaaggcataggtgctgccaacggtcaggccgttgatcagctgctggaagtagtggtagagctcaggcattacattctcctgaacacccgcagcccgtgctagcagggccatcgaaaaaccgtctgcgttggcgacgttcgtcaaaggcagccttgatgcgggcccatcggtgctggttggaaacacctgagctgcacgtttcgactgttttgattcactgcgcatgcccttgggccggccttcggctgtggccgccttcggtcgttgcgcctcgtcttgcctgcctcgcctacgttttcaacggctgctcgaccgccaaggcggacctgcttcgaacacgctgcacgtggaatgcggcgccaggggctcggtgcggatcacgcacgttgccaatttcgaggcgggccagctgtgcaggccactcgcttggttgaaggtgttgctggggtcgtcccatcgcttgtggccgggtcagccccgatcagctaaaacaaagcccacagcggatgccgtgggcttcggttgggtggttaaaggctcacttggcttcggtcttggtgccgtcctggtgccattcgtaaaccacgaagttgaagtccttcaggtcgcccttctcgtcgaacgagaggctgccggtcggggtatcgaaggtgttgctgcgcagcgccttggcgacctcttcggtatccgtgctgccggccttctcgatgccctcggcaatgacctgcacggcggcgtaggccgggaacacgaacgggccgctcgggtcctgcttcttcgccttgaatgcatcgaccagttcctggttgcgcggatcctgatcgaacgacttcggcagcgtaaccagcatgccttccgaagctggaccggcaatggcggaaatttccgagttgccgacgccttcaggccccatgaaccgcacgttcaggcccttctccttggattggcgcagcagcaggccgagttccgggtgatagccgccgtagtagacgaaatccacgcctgcctgcttgagcttggaaatcatcgaggagaagtccttgtcgccggcgttgatgccttcgaacaggctgaccttgacgcctttcttctccagggtttccttcacggcggtagcgatgccttcaccgtactgctgcttgtcgtggatgacggccacgttcttcggcttgacgtggtcggcaatgtagttgccggcggtcgggccctgcaggctatccaggccgatggtgcggaagatcagcttgtagccgcgcgaggtgatttccgggctggtggacgccgcggtgatcatcaggatgccttcgtcttcgtagatgtcggatgccggctgggtcgagctggagcacaggtggccgaccacgaagctgatgccgtcattgacgatcttgttggcaaccgcgaccgcctgcttcgggtcgcacgcgtcgtcatacacgacaccttcgagctgcttgccgtcgacgccgccttttttgttgatctgctcgatggccatctgggcaccgatgaattgcatgtccccgtattgcgcaacggctccggtgaccgggccggccaaaccgatcttgatcgtgtcggcggcaagcgtgtagctcgcggctcctgtcaaagcgatagccatgaaaagtttggacagacgttgcttggtcttcatatgcgctccacttgcatcattattgtttgaatcctgctggctgcagtgtcgttacggggcaaacgtccccaaacggtacggcaactgtaccggcacagtgtagaagcgtcagcacctgtttgcacagtcaggaatcatccggttgatgagatttacccgaacgctatcattgcgccctttacgtaaacgggtaggtcccatgaaccaagattcaagcactctctatgccaagctgctgggtgaaaccgcatcgatcacctggcaggagttgcaacccttcttcgcccgcggtgccttgctgcgcgtggttggcgacgtcgatctgatcgaagccgcccaggccgtcgcgcaagacgatcgagagaaggtagccgagtggctggcgaaaggccatatggccaagctcgaagccgaccaagcgcaggattggctggagcgtgatcctcaactctgggctgtcgtggtggcaccgtgggtattggtccaggagcggggcgagcgcccggcactgcactgatcaggggcgctccgcatgcgttgccgatcactcatgtgaccttcttgcaggtgtccttgcgattgggcatctgtttgcacttctcaccgcagcgcgtcgtcatcctgctcgagcgtgttggccaacatctgtcgacgatgaacagttgctcaggcctgaatatcagccgcgcacccagcgcattcgtgcccagccactcagggcgtcgaccgccaacaccatcagcagcatggcgaggatgaccgtcgaggcttgcgcttcctggaacaggctgaggctcatgtagagcatctggcccaggccacccgcgccgacgaagccaagcacgctggccatgcggatgttgttttcccagcgatacagggtgtaggccatcagttgtggccagaggatgggcagcgtgccgtagcagaaagcgctgatgcgactgctacctgccaggcgcaacgcctcggctggcgcgttcggcgtgttttccagggcttcggcgaacagcctccccagcaccccggcggtgtgtagcgccagcgccagggtgcctgcattcgggccaagaccggcggcaaggaccatcagcgccgcccagaccagttccggtacggcacgcagggcattgagcagcagccgcgctgcgcctttggcgatcaggccgacgcggcccgctgccggaagtgccagcagcgccccgagcagtgccgccaacaatgtgcccatcgccgacatcgccagggtttccagggcggcgtagccaatcgcccgcaggtggccggccgacaggtcggggtggagaaagccggcggcgtagtcggccatctgccgcaggccgtcgacactgaacactgcgccggcctcgagttgcagaaaaacgaacgagccgatcaccgcagcgatcagcaacagcggccatgcgtagcgcgacagggcgttcatgcgaagctccggcgcaacagctggctgatgaggtcggccagtagcaccagcagcaggaaagtcagcagcatgctcgccacttcaccaccggcgaacatgcgcatcgacaggtccatctgctggcccagcccgcccgcgccgacgaagcccatgaccaccgacgcgcgcaccgcgcattcccagcggtagacggtatacgagagcatctctccggtggcttgaggcagtacgccgtaggcgaacgcctggagccgcgagctgcctgccccaagcagggcgcggatcggcagcgggtcgaccgactcgaagatttcggcgtagaccttgcccagcatgccggcgtaagtgatggcgatggccattaccccggcggtcggcccgaggcccaccgcgcgcacgaacagcagcgcccagacgatctccggcacactgcgcaagaggatcagcaatcctcgcaccggccagcgagccgcctcggcccattttccaggccgtccgccgcggctgagtgccgacagtgacaaggcacgggtggccagcagggcgcagggcaacgctacgatcagcgccagcgccatgcccgcggtcgcgatcgccagggtttccagggtggcgcggcccagcaggctcagaaaggcttcgtcatgtgccggcggccagaatccggaaaggaacacgcccatggtctcggcattgctgccgtcgaccagcacgctcaggtcgagttcgctcagcgacaggcctggccagagcaatgccagcgtcagcagcgtcaccatcagccgcggaccggcggccgggtcccttcgggtgagcgaaggcgtcagcatcgaggcacgtgcaacggcagatcgggcagcgtcagcagggtttgctcgccgtccagctgctcattggcatagagcgcctcgagttcgacaggcgtgacctgcgccgcggctttgtcgaacagaatgcgtccggcgcggactccgatgatccgcgggaaatgctccagcgccagctcgacggcgtgcaggctggccagcagggtcgcctgacggcgcacgctgtcgcggttgagcacccccagcgaatacgcggcgagcaccggatccatcgccgatacgggctcgtcggcaagcaccagctcaggttgttggtaaagcacgcgggcgatgccgacacgttgcagttgtccgccggaaagctcgtcgcagcgcacgtaaagcttgtcctccagatccagccggttcagcgcctcggccgcgcccccgatatccagcggatagaccaggctggccaggctgcgagcaagtgaccactgacccagacggccggccaacacggcggtgatgacgcgttgccgcgggggaaggggtggcgcctggtgaatcagccccacgcgcgtgcgcaatttttgcagcgcccctgcggacatcgaccacggcgcgcagcccagcatctcgaagtgcccgctgctgggttgaatatggctggccagcaggcgcagcagggtggtcttgcccgcgccggacgggccgatgatcgccacgcgctcgccctgcgtgatggtcaggtcgatatcctgcaaggcgagcgtgccgttggcgtggcgctggctcaggccggccaggcgcaggcacggagcggccagggcgtagtcttgcgcgggtgacatcttcatcgatggactcatcgtgacgggagcgttcgcagtggggatgtccacggcccggattcgcgttggacggagcggcgcctgcggggcgtgcccctaggtacagctaggtgggccggccgggtgccggccacttcgtggccgctgcgtgtgggagccgcggctctacttcagcagaccagcggcacgcgcggcttgctcgatgccttcgtaattttccgcgcgagtctcgatgaagcggctggcggcttgcagatcgagaatcttcttgtgctccgggttggccgggtccagcgcgaggaacgccgccttgatcttgtccaccagcaccggatcgagatcgccgcgcaccgtccagttgtagtcgtagtacggcggtgtggtggagatcactcgcaccttgtccgtgtcgaccttgcctgcggcgaccagtttttcccacaccgacgcattgagcacgccaccgtcggctttgccggcttcgacccaggcggccgtcgcgtcatgcgcgccggagtaggcgatgcgcttgaagaactgctcgggatcgatgccgtccctgatcatgaaatagcgtggcatcaggctgccggaggtcgaggagacggagccgaaggcgaaagtcttgcccttgagatcctgcagcgttttcacgtcgggatcggcggtgatgaatttgctggtgaactgttcgtcctgctcgcgctgcaccagagggatcgcatcgccggtcttcaggcgggtctggacgaaggtgaaaccaccgagccaggccaggtcgagccgatcggacgcgagcgcttcaaccacggcggcataatcggagaccggggtgaatttcaccggcatgcccagttctttctcgaggtatttgcccagtggctcgaacttgcggatcagttcggttggcgcttcgtcggggatagccgacacccgaagcgtttcggcggcatgagcggttacgaaagacagggatacggcaaggccggcaagggctgccagggtgcgcttcagcattgtggttctccggttaaatagcggaaagcgcgcggattatagaggttgcaagccctgcacgggcaagtcgcttcgtggcggcggcggaggatgtcggcgatcgcggcggcggattcgtcctggccagcctgagcatcagccccaaaaaagtctggctcggcctaaacattttttttgtgattcagatctcggttaactagaatcgccgccttcacggacgatggtggcttattgctatgaatccaaggcaggacaagcgcacgctacatgcccttcgtaaacacatcgatgaactactcgcctccggggcgacgatcacctcgcgcgatccggtgacgatcgtcactgcgggggagacgctgaaagtcaggcaaggcatgttggtcggttactccggctttctcgatatggtcgagccggcggcggaccatgactggccggacgcgctgaggcagatggcgatcgatctctgcatcaaacagctcgaccaggccatcgaggccctggagcgtcgccagccatcgaccactcaggcccctgcggccaatgacggctcggtcgtcggctgacatccgcatcgctccgggatcgttgcccggcttggccctgcctcgcggcggatcgcgtaccgggtttctcacggggctgctatatcctcagtaaatgaactgggcgagaacgcttcggtcaggtccgaatcagacgtgcatggatgcttcgtcggtatcgatcatcggaggggccatgcacgagccaaccgcgcaacacggattcatcccaccctacatcctcgaccggatcatcgatcacggctcgcaagggcagcgcgagcgcgcgctgggcaccttgacgcatgtacgcagcctgctgccgaatcccggtccgcccaagcgccagcctatggtcggcgtcgtgcccgagggggctcggccaggggagccgcggcgcagcattcacgatgcccagcaacaaatggtgttgccgggtgtgctggcgcggatcgaaggccaaccggccgtcggcgatgcggcggtcgatgaggcctatgaagcgcttggcaagacacaccagttcttctggcaggtgctgggccgcaactcgatcgacaatcacgggtttccgctggtcgggacggtgcattacggcgtcggctacgaaaacgccttctggaacggtgcgcagatggtctttggcgacggtgacggcgagatcttcaatcgcttcacctcatcgctggatgtcgtggcgcacgagctggcccacggggtgatcgaaagcgaggcagggctggtctatttcaaccagtccggcgcgttgaacgagtcgatctccgatgtgttcggggtgttggtcaaacagttcggcctcggccagactgcggatcaggcggactggctgatcggcgccgagctgctgaccgacaaggtgcagggtgttgcgctgcgctcgatggccaacccgggaagcgcctacgacgacccgttgctgggcaaggatccacaaccggggcacatgcgcgactatgtcgacactcgcgacgacaacggcggtgtgcacctcaactccggcattcccaaccgcgcgttctacctggcggcgacggccatcgggggccatgcctgggagacggccgggcgcatctggtacgacaccctctgcgatcgccgtttggccaacgatgcggatttcgctgcgttcgcccagctcacgctggttcatgccgaggcgcgcttcggtgacgcggatgagctgcggttcgtgcggcgggcctgggccgacgttggggtatcagtgagctgaggagggttccatgaaacagctgccaccgttgggcaaggatgcgtccgtgcgcttgtcgaggcagggcggcttcgccgcgatccaggcgctcagtcggccgcgcgaaatcgatttcgccagctgtgacgagcagcagcgcggacagttgtgctcgctgttggagggctgcctgccgctggcgtcggacgacggcgggcggggcgaccaccgttactatcagatcgagttgcgttaccgggagcgggagcgcgacgacgagatggtgctgcgtattccggaagagcaggcgcctggggaactggtgcggctctgggacaagggcgaactacgctgaagccgacttgcgcctacgcattgtcgcggggctagaatcgccgacccccgttttccgaggaacgcttcatgtccgagttgccatccgttgccttcgccggcattggcctgatgggtcatcgcatgtgccatcggctgcttgccgccggttacccgctgaccgtctggaaccgttcgcctgaaaaatgcgcgtccctggtcgaagccggtgcacggcgggtagatagcccggccgaactctgtgctgccgccgatctggtgctgctgtgcctggccgataccgcagtcgtgcgcgaggtggttttcggcgcaggcggcatcgtcgagggcgcacggcctggccagttgctgatcgaccactccagcctcgagccggccgctacgcgcaacatggctgccgagctcgaatcacgctgcggcatgtactgggtcgatgcgccggtgtccggtggcacggccggcgccgaggcgggcacgctggcgatcatggccggcggtcgcgctgaagatgtcgagcgcgcccgcccggtgctggcgcatctgggccagcggctgacccacatgggtggcgtcggcgcgggtcaggtgaccaaggcttgtaaccagatgatcgtcggctgcaatgcgctggtcatcgcggaagtggtcgccctggccgaacgctccggcgtcgatgccagtctgctggcgccggcgctggccggcggcttcgccgattcgaaaccgctgcagatcctcgccccgcagatggccgccagcgaattcgaaccggtgaaatggtacgtgcgaaccctgctcaaggacctcgatactgcggtccggttgtcccgtgaggcgggcagcgcgacaccgatggcggggctcgccgcgcaactgatgcgtctgcacgggagtcatggccatctggagcacgaccccgccaccctgatcgagctgttccgggagcgagcccaatgaagattgccgccaacctgtccatgttattcaaggagctgccgctggccgagcgcatcatggcggcgaaggtcgctggcttcgatggcgtggaaatccagtttccctatgaattgccggcgattcgcctgaaggaattgctcgagcgggcgggattgccactggtgctgatcaatctgccggccggcgatttcatgaccggtggcgccgggctggcggcggtgccatcgcggcagaccgacttcgacgcggcgttgcaggaagccttgagctacgccgcaatgacccgcccggcctgcgtcaacgtgctacccggccggctggccgccggcgtctcgcgcgatgaggcgctggacaccctggtcgccaacctgcgcaagagcgccgacgcctttgcgctgctcggcatccgggtactgtgcgaggcgatcaacccgctggacatgccgggctttctgatcaacacgcccgagcatctaaaggtgctgctcgagcgcgtcgatcattccaactgccaggcgcagttggatctttaccacatggctcgccaggagctggatgtcgcggcggggatccggctactgggcgagcgaatcggtcatgtgcagtttgccgactgccccggtcgcggcgcgccgggtagcggctcggtggcgttcgaacccttgttcgatgcgctgcgcgaggtgaactacgacggttggctggcggccgaataccgccccgaaggcccgagtaccacggccgggctcgcctggctcgagggctggcggcggctctgagccgccgcattggctggcataagcgaagatgatggtgacagacaggcggcgcggagaactctagagtcagttcgcgagtcggtcagcaagcggccggcgcataacaataactcgagagcgacgtcatgcagccatccacccaagccgcgaacgcctggcgcgtcctgttcctgctgtttctggccaacctgttcaacttcttcgatcgcaccattccggcgatcatcgccgagccgatccggctggagtggaatctcaacgatttccagctgggcctgatcggcacggccttcaccatcatctatgcgatcgccggggtgccgctggggcgcatggccgacgtcggctcgcgccgcaagatcatgggttgggggctcaccgtctggagcggcctgacggcggtcaacggcttcgcctggaacttctggagctttctgctggtgcgcatgggcatcggcatcggtgaagccagctacgcgccggccgccaactcgttgatcggtgatctgttcccggccaacaagcgcgcccgggcgatgggcatcttcatgctcggcctgccgctggggctgctgctggcgttcttcaccatcggctcgatggtgcagtacttcggtagctggcgtgcgccgttcttcatcgccgccgtcccgggcctggtgctggcactgttcatcttcctggtgcgcgaacctcagcgcggagcggccgagacggtcaaggtttcccaggagccggtgcagcaaccggtgcgcaaggtcctggcgatccgcaccttctggtggctggtactggcgggattggcgttcaacttcgccacctacgcctgcaacgccttcatggtgccgctgttgatgcgctatcacgccgtgccgctggtggaggcgtccatcgctaccggtgtgatcgtcggcctgaccggtctgatcggcctgaccttcggcggctgggttgccgacaagatccatcaacgcttcgcccggggccggctgatcttcgctgccgtgagcatggccgtcgccaccctggcgacgggctacgcgctgctggcagggcgcatcgaggtcggcgtgttcgtggcggtcttcagtatcggctggctgttttcctacaacttctacacctgcgtctacaccgccattcaggacgtggtcgagccgcgccttcgggccacggccatggcgctgttcttcgccgggctgtacctgctcggaggtggcatgggcactgtggtggtggggctgctgtcggaccatttcgccactgcggcgatgctggccgccggggccagcgagatgagcgaggtgttccgggctgaagggttacacggcgccatgtacctgatcccggcgtcgctgctgctgaccatggtgttcctgttccaggcgtcgcgcaccttctgccatgacgccaagcgcatgaccgatggcatgagtctgtcggtcagcgaagccgaggccgctctggcctgatcccccaggctgtcgaccgcccgttggcggtcggcggcaggctctccgacgattgacctgcaaactcgtgcaggctcgcatacactgcgcggccgttttttggcagtccggaccgcttatgcaaaacccgacccccgcccgtgcctgcggcgtcgacttcggcacctccaattccaccgttggctggtggcgccccggcaccgatccgctgctggtgctggaagacgcacagcacaccctgccgtccgtagttttcttcaacgtcgaggagcgccgcccggtgtacggccggttggccctggctgagtacctggaaggctacgaagggcggctgatgcgttcgctcaagagcctgctgggctccaagctgcttaaaagtgagactacggtgctgggcagcgccatgccgttcaaggacatcctcgcgctgttcctcggtacgctcaaacagcgcgccgaagagcaggccgggcgctccttcgacgaagtggtgctgggccgcccggtgttcttcgtcgacgacgatccgcaggccgacaaggaagccgccgataccctcgcggccgccgcccggaagatcggcttcaaggatgtgtcgttccagtacgaacccatcgccgcggcgttcgattacgagtcgcgcatcgagcgcgaggagcgcgtgctgatcgtcgacatcggtggcggtacatcggatttttccctggtaaggctggccccggagcgacgggcgatcgacgaccgtcagagcgacatcctcgccacctccggcgtgcacatcggcggcaccgacttcgacaagcagctcagcctgcagggcgtgatgccgctgttcggctacggcagccggatgaaaagcgatgcgccgatgcccaccagcacgcacctcaacctggccacctggcacaccatcaatgcggtctatgcgccggcttcgctgcgcgcactgcagagcatgcgctacgacatcgtcgaccccaccggcatcgaccggctgttcagcctgatcgagcagcgcgccggacactggcttgccatgcaggtggagcagggcaagatcgagttgaccgagcatgaacgctacctgatcgacttcgcgcgaatcgaacccggcctcgaagccgcgctgacacggcccgtattcgaaacggcgatcgagccgttgctcgaacgaatccgcgccaatgtcagtcaattgctggcaagtgctgggctcaagcatgcggatatcgatacggtgttcttcaccggcggctcgagtgccattccggcgttgcgccagagcgttgccgcactgctgccgcgggcacgtcacgtcgagggcaatcgcttcggcagcatcggcagcggtctggccatcgaggcgcgcaagcgctacggttgattcgcccgtcatgcctgctgtctcaagcctggcagcgggtctgatcgggggttttcatggggtacaaactgcgtccgcgagatccagctgtcgaggtgcgcaaggtcgcccggcaggggttcgacaaagccatcgaggccttgagcgtgccgcccgcggagcggggcgaaggcgtgcaccaggcacgcaagcgcttcaaggagctgcgcgcgttgctgcggctggtgcgcaaaccgctgggtgacgaatttcagcgcgagaaccatcacctgcgggacctgggccggcaactggccgagtcgcgcgacgccaccgccatgctggaaagctgggacgcgctggcggcgcgtttccccgagccgttcgccgagacgaccttcaagcaggccaggcggcggctacgggccagggcagatcacgccggaagcggcgttgccgagatcgacacgcgcatcgccaaggtgatcgacgagctgaagggcgggcaggcccgtatcgacagctggccgctgcaggccaagggcttcgacctgttggcgggcggaatcaagcgcacctacgccgatggctgcgcggagctggccagggtcaggctcgatctgagcgacgagcagctccatcaatggcgcaagcgggtcaaggatcactggtaccagacgcgattgctggcgccgagctggccgaagctgatgcagttgcgcagcgactcgttgaagaagctcgccgatctgctcggcgatgaccacgatctcgcggtgatgcgccagctcatgcagcaacagccggagctgttcggcgacgaggcgatgcaggagcgcctcggcaacctgattgccgagcgtcgcagcgagttgcagagtgctgcgctgaagctgggcggcgaactttacgctgaggcgcctgcagagttggtggcgcgctggcggcgctactgggacggcgccaccgagtagcgcgcgggttgccgggccgatctggtgtcaggtcgcctggctgttttgctcgtggattgtcagcaccttttcaaggctcggtgcgagtgaaccgatcattgcagccggcaggtattcgcgcagcttgccgatgagcggccaagggtaacggcgcccggcccaggccgtgtgcgccgtcgttcggtcagagcttcttcgccgaaacgatcttcaccggtgtcagcggtacgttctgcatcatgctgcggttgccggtcggcacctgggcgatctggtcgaccacgtccatgccgcgcaccaccttgccgaacaccgcatagccgaaatcgcggctgccatggtcgaggaaatcgttgtcacggtgattgatgaagaactggctggtggccgagtcgacgctctgggtacgggccatcgccagggtgccacggacgttgtgcaggccattgtcggcctcgttcttgatcggctcgcgggtcttcttctgattcaatccttcgttgaagccaccgccctgaaccatgaagcccgggatcacccgatggaaaacggtgccgtcataaaagccgctctcgacgtattcgagaaagttcttcgtgctgatcggcgccttctcggcttccagttctatttcgatttcgcccatgctggtgttgagcaggacgtgaggattctccgcggcaagcaggttgccggccagcagtagcgaacaggcggcgagtacgagtcgtttcatggtgcgttcctggtatgggtaagcctgggtggcccgctcaggcaggccggatcgaaaccaggcgcggcggctgcgcctcagccttcgcgcttggcgctcagcgcctgaacgggcgtttgtgcttgtgcatcgtacgtcttgatcaggtcgatgagaatctgcgtggccggcccgagtggccggtccgggttcgtatagaggtagaacagcggccgtcgaatgctgccctggatcaagggcaacggcttgagcgcgccctcggccagctcgcgcgcgatcatgtggcggggcagccaggcaaagccaaggccgctactgacgaagccgaccgaggtggcgaggctgcccaccgtccagcgctgttcggcaccgagccagccgctgtcgcgcggctggcgcacgcccgaatcgcgcacgaccacctgcatctggctttgcaggtcctgcacgctgagcttgcgctgcaactgatgcagcgcatggttgggatgagcaacggcgatgaactccacgttgcccagctcctggccgagatagccggtgatgtccaggccgctgatggccagatcggccgtaccgtccttgagcacctcctcgacgccggacagcacctcctcgcgcaagcgcacccgacagccgcggctctgcggcatgaaggcggtgagtgcgcgaatcagctttgcgttggggtaagcggcatcgactaccagccgcacctcggcctcccagccctgctccatgtggtgggccaggtcttccagctggccggcctggtgcaccagttgccgtgagcgccgcagcagtacctcgccggcatcggtaagcaccgccttgcgaccatcgatacgcaacagcggcacgcccagttgctcctgcatgcgtgccacggtgtagctgaccgaggactgcgagcgatgcagcatttccgcggcctgggcgaagccgccgtggtcgatcaccgcttgcagggtccgccattgatcgagggtcacgcggggtactttcattccagtgctttcctgttgcgtcggtctggtacgctggcactcgccttcacgaggagtccgcttgaatatgaataaactttgcgttgtcgcgctcgccatcttcccattgagcgccctggccgtcagctatcccgtggagctggagcaaacgctcaacggcgccgaggtgctggccagcaccgaaaccatcgaccgcgacatggcggggttgctgttgcagaactatggcaaccgcccggtggagtgtaatgcggtgtttcgcaacggaccggaagcacctcgcacccggcacctgacattgcaggcgggcgagcgcaaaccgatgacggcgaaattcaagcgcgatgtcattcgcttgcgcatcaagctgacctgcgagccgcaatgacatcggcctgagcccaatggccgccgtcgactcgtctggcgccctgcgcccgctaaagcccgctcggcgtccggttccaccgttgcgctgcacaaagccgccgcggagtgcgccggacgggttaatctatgcgacgttttttcgatcctgaggtagtcccccttgtttgaccaattcgccctccacgaacgcctgctcaaggcggtcgccgaactcaaattcgtcgagccgaccccggtgcaggtggcggccattccccccgcgctggaagggcgtgacctgagggtgacggcgcagaccggtagcggcaagaccgccgccttcgtgctgccgatgctcaaccggctgatcggcgacgccgtggtgcgtaccgacgtgcgcgcgctgattctgctgccgacccgtgaactggcgcagcagacgctcaaggaagtcgagcgcttctcgcagttcaccttcatcaagtcggcgatgatcactggcggcgaggacttcaaggtccaggccgctatcctgcgcaaggtgccggacattctcatcggcaccccggggcgcctgatcgaacacctgaactccggtacgttgatcctcaaggatgtcgagctgctgatcctcgacgaagccgaccgcatgctcgacatgggctttgccgaggatgtgcaacgcctggtcggcgaatgcgccaagcgccagcagacgctgctgttttccgccaccagcggcggtgcggcgttgcgcgagatgaccgccgccgtgttgcgtgacccgctgcatctgcagctcaaccgggtcagtgagctgaacgagggcacgcgccagcagatcatcacggccgaggataccgagcacaaggaaaagctggttcattggctgctggccaacgagacctacaagaaggcggtgatcttcaccaacacccgagtgcaggccgaccgcctctatggccggctggtcgccgagggggtgaaggccttcgtgctgcacggcgacaaggaccagaaggaccgcaagctggccatcgatcgggtcaaggagggcggcgtcaaggtattggtggcgactgatgtggccgcgcgcgggttggatatcgaaggcctggatctggtgatcaacttcgacatgccgcgttcgggtgacgagtacgtgcaccgcatcggccgtaccggccgcgcgggtgccgaagggctggcgatctcgctgatctgccacaacgactggaaccttatgtccagcatcgagcgctacctcaagcagcgcttcgagcgtcgtgtgatcaagggtctcaagggtagctacatgggaccgaagaatctcaaggcttcgggcaaggccgccggtaccaagaagaaaaaagaagacaagaagaaggcggcggacaagaagggcaaaccggcagcgaagccggtggccaagcgtccgaagaacgccaagcgcgaggccccggctccgctggtcagccaggatggcttggcgccgctgcgccgcaagaaacctacaccgcagtgatccacgcagccggggtggatccgctaccccggctcaggtgattcagcgtttttcagccggtgcgatatcggcgtccttctccgcctgctcgacgtgctcgatgcgcttgtcgtaagcctcgcactcattgccgagctgctcggcggtctgcttgacctccatgtcccgcaactcctgattgatctccgtggcgcgtttgggatcgttctcggtcagtgcactgacgcgatcggcgagctccttggccttttcgttgatctggtcagtcgtgcattggtcggcgagcaccggctggctggccagcagggcgagggtgagggggagtatcaggcgtctcatggcgcgctccttttgtcatcgatctgttcggttgattgccgtcgacgcgctttagttcagccgtttccgttgggccgggatcgaaccatgccgctggcggcggggtccgaatgtgcaagagccgccgttctgtggcggtgcgacaggagaacggacatgagctacgactgggacctgatgttgcgcctgctccgagaagcgcagaaagctggcaacgagcccttcgccccgcgccagtatgccgatgagcatgcgctggcaatggaagaggccggccagccgatgcccaacatggattcgttgaaggccgaagcgcagaactacgaaagctaccttttcgagggaggcttcatggtggcgcgtcctgaggaggaaggtggcaatggcgagaacttcgtgctgaccgagcgcggcgtgcgcttgctgaacatgctcgaaggcggcgacctcggccatcgtcaacggctggacgaaaagggcgagtcggcactcacccctgaagtcttcgacggcatggcgacgggttgagccttgcggcgctcagtcgagcacggagcgcaacgggtcagagcgggccgaccgctccgcaggacttgttggcggcatgcttgagcagcaccggcagctgcgggcgaggcttgccgttcttgacgtccagcgacagcgcgtaatcgttccaccaggggcctgccgcccagtaggtgctcgggatgcaatgctggccgaggtaccggagcaggttatccgtcgcggcgacggccgaaggcgagtagtccggtgcgccgtgctcgccgatgaaaccacgtagccggtatttgctcagccactcgacgaagggtttggccctgaccacgcctatcatcgggtcatacacctcgttgcggttcgtgtaatagccggagtaatccttgtcgaagtacaggtgggcttcgaacatcaggttgttcttcgcatcgcgcatccaggggtcgctgaccagccgggtgttgtaggacggccagtggaacgcgctcgaccagcgatcgccagcgatgatcacccaatgctgcgcatcgacgctgcgaatgctcttcgcagcggcaagggcggcttcgggccacttgccgttggtggtgtggggctcgttcatcaagccgtagccatagaccgccgggtgattggcgacctgctgggcgatgcgtcgccaggtatcggcgaacgcgctcaccggtacgtcgccggagccgatcatcttgccgtagtagcggtagtagttatgcatgtcgaggatgacctgcatgccgtacttgcgggcatggtcgagcgtggccagcaggcgtcctagctcggcgcggttcaactcgccgttgagccgcggctggatccgctcccagcgaaacggcaggcgcaccagtttcaggttgcgctcggcgtagcgcttgaagtccgcctcgccgggatagatgtattgcttcagataaaccccgggcagcgcgacatcggcgccgaattcggcaccggccaggttgatgccgaccaggttgatgggattcgccggtgcgccgccgccgacgggcgtctggctgccggggttcggggtgggattgctgaagccggtgctgcttaccgagacggtgcgcggatagccgacggccttaccgttgatggcaccaccgtcgaccatgacggtcatgttgccgcccgattgatagatcagcgtgatactacgcacctggccatcggcgaagcggatcttcgcacctttgtggaacgcggccttgttctccgccgtcgccttgaccgatacaccgttgaacttgctggtgttgtagacaccgttgacgaaatcgccgccgttgaatgcgttcagcgccacggtctgcgcgggcgcctggttcgcaggcggcgtgaccaccggcgcggagggctgactcggcgcgggtgtgggctgaactggagtggcggtgctggtggtcgaaagcagcttgttcgggtagccaagcttgccgctgagggtcgcaccgctgagcattacgctcatgttgttgccggagatgtacaccgcgctgatcttgcgcacctggccgtccgccagcctgaccgacgatccgaccttgaatgcggcgcggtttgcgctgctggccgggatcgacaagccggccgacctgcgccatacgccgctcagccagtcgttgttggtgtagttgttgatggcggaactgtggacggcagcactgccctggttcgcatcggtgcttgggacgacgaccgcagcgccatctgatggcgccgctcccaatgccgagaggctcttggggtaaccgttcttcgatgcgtcaagggcggtgccggagaacatcacgctcatgtgcgcgccggaaaagtaaaccaccttgatcgagcgaacctgtccgtccgcggtcctgacctggacgcctttcctgaacgccgccttgtttgccgccgtggctgggatggacaggccggccgactggcgccaactgccctttagccactgtgaactggtgaagtcgttgacctgagcggtcgcgatgctctgcagcgacgaaacggccgccttgggcgtcgccgcgtgtacgggctggagcgggctgaagccgattacggccagcagagcggtgccgagcagcaccttgggtgcgctgaatgttgcctgaacggacatgaggatctccggaacttaatacgacaaaaggccgaagccttttaaaaagcgcggaagcgtccaaggacatgcaacgagtgaagcaccgaccaacgacaccacctatccacgcgacccgacgagagaagtccgcccgattcgcgtggataggttttatataggttgtcggtgtctttttgaagttaatctggcgccataaattagttgttctgttagctaatgattgaaagtgttgcggtgctattagttgatggcttttaaatattaaatggccgctattcaataacttactgaattaactgccgtttatcgaagctcttgctgatttttgaagatgcaggcgcggcagacaccgcttcgtctgtttgtggtgtgccggagcaatccactaaatgcaggtattacagagtatgtcaaagcgaggcggtatataggcgcggagagggcacttaatagcgaaatgatagcgctctgcgcgttatcggacctgttgcaggctgtccaccgtcagctccaatgccttgcgcatatccagcctcgccgagcggccaatgtcccggttgttcaattgatagctgcgttcggaaggcaggatcggtgcagtcaggtcatccgcttctgccgcttcgaaatcgctgttgcggccgatggtcagcgcgcttcggcgtaatagttcgcgcaactgttcaggcgccagggctggattgatcgacaacatggcgccgacgatgccggtgaccatgggggttgcgtaggaagtaccgcagtgcacctcgccgcgcttgcccgtttgcagcgtggccgcgcgggtgcaggcggacgcggtgatgtcgacgcgcatgtccacgtttgaagacggacgcttggtcacgtagtccggatgttcgaccggcacatccttgctgaaatcgcgctgatgagcgcccaccaccagcaattgctcggtgatgaatgaggagggcaggcggtaatcgtcctggcccgagcgggccgagccgttgccagccgagttgaccaccagcacatcgggatgctcgcggcgcagccagaggaagaattcttccagcagctcttcgtaaccactcatggcgacccccgagcgaatcagcgagtcgacctcttctccctcgacatcccgcgtgccgatgcgatgaatcccccaactccagttcagcactcgtacgccgtcctcgaccaggttgaccgaggccgcgacgttggcggtgatgccggcatccgagttgcgctcgacgatgatctcgaagcctgcgctcgccggctcgatcgccgttagaaagccgcggtcttgcgcttcgacgctgcgtgcggccaggatgccggtgacgctggtgccgtgttccgctggcgattgcgcatcgcgggcataaacgcaggtgcgaggcgtattcggatcgcactcgccgagataggccttgaattcgggcgagtcgaagtcgacgtcgcgctcgatgatgccgatgcgcaccggctgggccttgatcggggcgttctgtgccggcagtcgccgttggtagaagtccactgcatcgaggaagcgattggcgacccactcactgttgcgtggcttgggttgctggtcttgttccagcggctcttcggctccggattcctcgatgatcacggcatccacgctcgtttcgctgcccaggcgcagcaccaacgcgtcgcgttcggtcaggttcctgaccggtagccgcagctggtaggtgttgagcggcgcaatggcacccaccacttcggcaccgtacttctccgccaggcgccgcgactcgtgcagtccgtcgtggtcctcctcgatgatcacgctgaccaggtccacataggtggtcaggccgtccatgttcttggcgacttcgtccggacccgccggcaccacatggctgccattgacggtgagccagaccggattgctgcggcgctcaccttgctccagccagagcggaccacttcgatggttctgtctgctcagggtcaggcgaagccggccatcctgcgcccgggtcgtctcgacgggcttgccgcgaagcatcacgttcaaatcgtcgcgggtgagcccctcgctgcgcaggcagaaggtcagctgttcagcggagaagagatcaccgcagcgctgcaggtccttgagccgcagcggctgttcctcggcggctgcagtaccgaggccaagcgcgagcgcaagcgcggtcagagggcgtgcgatgggcctcatgaacggcgttgcaggtaatggacgctgaacaggtcctgagcatcggtccattggccgctgcaatcgaagccggcgctgctggcgagcgcggcgaaggactgcagcgtgtatttgtaggaattctcggtatgcaggctttcaccggcgtcgaaatgaaagcgctggccttcgatggtgatgtcctgtgcttcgcggctgatcaggtgcatctcgatccgcgaatcctgctcgttgaaaaatgcctgatgggtgaagcgcgacggatcgatatcgctgtccagttcctggcggatgcgctgtagcaggttgaggttgaacgccgcggtgacgtgggcgcggtcgttataggccgcctccagcacgctgcggtccttgaccaggtccacgccaatcagcacgccgccgcccggcgggagaatctcgtgcaggtgcccgagcagcctgcgcgcttccagtggggtgaagttgccgatgctcgagccgggaaagaacaccagcggatggtgaatggtgaagtcgtccggcagtttcagttcatcggagaaatccgcgcaggccgcatgcacctccagccaggggtaatcggcggcgagtcgctgagtgctggtcaggaggaagtcctccgagatgtcgatgcccagatagctgaccggacgcagcccctcgagcagcaggcggaccttgcggctggcgccgctgcccagttcgatcaggtcggtctgcgggccggcgatttccagtatttcgttcgccgcattggcgaggatcttttcctcggtgcgggtcacgtagtattcgggctgcaggcagatctcctcgaacagctccgagccgcgtcggtcgtagaagaacttcggcgagatgcgcttgggcgttgcggcgaagcccgccagcgcttcgtcgcgcagggagctgtcgtgggttggctgcgtctggtcatgaaagtgtacggctagtgccatgtttcatagctccctggccaggcgcagcccggcgaattgccagcgcatcgccggctgaaagaagttgcggtaagtggcgcggatgtgggcctccggcgttgcgcaacagccgccgcgcagcaccatctggcccgacatgaatttgccgttgtattcgcccaggctgccctccagcgggcggaacccggggtaggggcggtaggcgctggccgtccattcccagacgtcgccgaacagctgagccggcccgtcatgcggcacgctggcaggaacaggttgcagatgatcgctttccagaaagttgccacgccgtggctggtcggtggcggcgacttcccattcggcttcggtgggcaagcgggcaccggcccagcgcgcataagcgtccgcttcatagaagctgacgtggcagacgggcgcttccagatccagcggctgcaagccgccgagtgtcatttcgcaccagccgccgtcctcgcggtgccagtacagcggcgcattccagccatgctggcggatgtgggcccagccatcggacagccagagctcgctgcgcgcgtagccgccgtcggcaatgaaggacaggtattcgcgattgcttaccaggcggtcggccagctgaaaatcctcgacgaactgccggtgccgcggcgtctcgcaatcgaaggcaaagccactgccggcatggccgatatgacgcacgccgccggcatagctgtgccagcggacgcggtcgttgtgcagcgcgggcgcgggtttcaggtcgctgcgatacaccgggtgcagcgggttctgcgccaagatgtgcttgatgtccatcagcagcagttcctgatgctgctgctcgtgctgcaggcccagctcgacccggcgcatgatctccgcggcgtgctgttgtggcgggttgccgagcaagtcgcccatcgcccggtcgacgtgctggcggaagcggtagacctcctccacgccaggccgcgagatcagcccgcgctggctgcgtgggaacggcgtgccgtgggtttcgtaataggagttgaacaggtagtcgtaggccggatcgagcggcttgtagccgggcagataaggcttgagcagaaagacttcgaagaaccagctgacatgcgccagatgccacttgggcgggctgacgtcgggcatgctctggatgacgtagtcttcggtctgcaacggggcgcaaatcgcttcgctggtcgcgcgaacctgccggaagcgttgcagcaggtagtccagttcggccagagccggctgttccgcccgctgttgtgccaggttccccatggtgcgttccccctcgttcgacattcgaaagctcgactgcgggcggccgaaccgcctctatagcgacccgaagcgaggcgcaaaagtttctgtcatgggtcggtcgcatgcccgcctgtagagcaaagcagcagaacgagcgaccggaaaggcgagccgacgattgtgcggcgccggtatgtctgcttcatggcggccagtgcgtgagtgaacgccgcggggggccgaatacgggcggtcgcggttgtcggctgcgcgccgttatctccagggctctgcagcgctcgtattgctacgcgttgcgcctgagtcgtcgatgcctcgcagcgagctacgagcgcaacgcgatttctcggcggccaggcgcgcagaacccatgcccaggccgtggtggcgggtcgctcatggtcgattcggatgagggcggctcagtagttcggtggggtttccgggatgccggtgtcgtcatccagcgccggcatggtccagggctcgaggcgctggcccttctcttccacgtcaagtcgcgcctgctcgatgacaccgccgagacgttgcgcactgatgtattcctcgtgtgacacgctgggcacacgcagcacctcggcaccgctacccgacatgaccgtgaagccgaaactgtcctcgtccgggttggcgctggtgacgcagccgcacggcaggaacgcttcggagacgagctgcatcgcttcgtccaggttcagggcttgattgatcatggtgttctccatcgacgggctgtctcaagtggaccctcaagcggcggcgccgtttccttccgcttgccgggtaggcgacgggctgtggcgagacggccttgtagatgcgccgtcgcggcagcatattcaggccatgacagacccaaacgtttccgacgcgctggccaatttccacccggcggtggccggctggttcggccgcagttttcccgcacccacgccggctcaggcccgcgcctggccactgatccgtgccggccgctcgaccctggtggcggcgcccaccggctcgggcaagacgctgaccgcctttctcgccgccatcgaccagctggtgcaggagggtgtcgccgaaggcggcctaccggaccggaccgcggtgctctacgtctcgccgctcaaggcgctgtccaacgacatccacgtcaatctcgagcagccgctggtgggcatttcggcagagctgcaagcgctcggcttgccaccgctagaaatccgcaccgccgtgcgtaccggcgacacgccgcaggccgagcgtgcggcgatgcgcaagcgggtgccgcacattctggtgacgacgccggagtcgctctatgtgctgctcggctccgagtcgggccggcagatgctgggccatgtgcgcagcgtgatcgtcgacgagatccatgccatcgccggcaacaagcgtggcagccacctggcgctatcgctggagcggctggaagcgttgtgcgggcagccgctggtgcgtgtcgggctgtcggcgacacagaagcccatcgaagcggtggccgatttcctggttggcgccgggcgcgactgcgaaatcatcgatgtgggccatggccgggcgcgcgacctcgccctggaggtgccgccggtcccgctggaagcggtgatgagcaacgatgtctgggagctggtctacgaccggctggccgtgttggcgggtgaacatcgcaccacgctggtcttcgtaaacacccggcggatggccgaacgggccgcacggcatttgagcgagcggctgggcaacacggtggttgcggcccaccacggcagtctcgcgcgcgaacagcggctggatgccgaacagcggctcaaacgcggcgagctgcgggtgctggtggctaccgcgtcgctggagttggggatcgacatcggcgacgtcgagttggtgtgccagctgggctcgccgcggtcgatttccgccttcctgcagcgcgtcggacgtgccggccaccaggtcggcggcatctccaaggggcggctgtttccaagttcacgcgacgacctgatcgaatgcgccgccttgctcgatgccgtgcgccgcggcgagctggataccctggtgatccctacggctccgctggacgtgctggcgcagcagatcgtggccgaggtgtcgtgccgggaatggcaggaggatgcgttgttcgcattgagccgtcgggccatgccctacgccgatttgagcgaggcggattatcaggcgctgctggcgatgctcgccgagggctacaccacccgccacggtgcgcgcggcgcctacctgcaccgcgatctgatcaaccgcagcctgcgcggacgacgcggcggtcgcctgaccgcgctgacctccggcggcaccattgccgacaattccgactactcggtgctgctggaaccccagggcttcaacatcggcacggtcaacgaagattttgccgtcgagagcctgaccggcgatgtcttccagctcggcaatacctcctaccgcatcatcaaggtcgaacccggccgcgtacgcgtcgaggatgcccagggccaaccgccgaacatcccgttctggctgggcgaagcgccggggcgcagcgacgagttgtccacagcggtggccaggttgcgtggggagatcgatgtgcgcctgagcaccgccgcccctcaccccagccctctccccggaggggagagggggcggtccgagtgggttgaaaagaatgtatctggctcggagttgggaggggcagcggaggggccggtgggcgctacgacgcgtccggtgaccgcaggcttgtctcccttacctgaagaggtgatcgaggcgcatcgtgccaccgccgcccctaaccccagccctctccccggaggggagagggggcggtccgagtgggttgaagaagatgcatccggctccgggatggagggggcagcggaggagcccgcgggcgctaatacgcgtccggtgggcgcaggcttgtctcccttacctgaagaggtgatcgaggcgcatcgcgccaccgccgcccctcaccccagccctctccccggaggggagagggggcggtccgcgtgggttggaagggatgcgtccggctcggagttgggaggggcagcggaggatccgatgggcgctacgacgcgcccggtgggcgcgggcttgccttccttgtctgagggaatgatcgatgtgcgcctgagcaccgctgcccctcaccccagtcctctccccggaggggagagggggcggtccgagtgggttggaaatgatgagtctggctcggagttgagaggggcagcggagggtccggtgggcgctgcgacgcgttcggtggttgcaggcttgtctcccttacctgaaggggtgatcgaggcgcatcgcgccaccgccgcccctcccagccctttccccggaggggagagggggcggtccgagtgggttggagatgatgtgtccggctcggagtggggaggggcagcggaggaaccggcgggcgctacgacgcgcccggtgcccacaggcttgtctcccttacctgaaggggtgatcgaggcgcatcgtgccaccgccgcccctaaccccagccctctccccggaggggagagggggcggtccgagtgggttggaaatgatgagtccggctccgggatggagggggcagcggaggggccggcgggcgttgcgacgcgtccggtggccgcaggcttgtctccctcgccccaggggggagagggccggggtgaggggggaacggcgcacacggtcgatctgatgccggccatcgactggctcaccgacaacctcggtctgccggaagccgccgctcgccagatcgtcgaatacctggcccgcgcccgttccgcgctgggcgcgctgccgacgcagcggcggttgatcatggagcgcttcttcgacgagtccggcggcacccagctggtcatccattcgccgttcggcagccggatcaaccgggcctgggggctggcgctgcgcaagcgcttctgccgcaccttcaacttcgagctgcaggccgcggcgaccgaggatgcgatcatcttttcgctgtccaccagccacagcttcccgctcgatgaagtgtggcgctacctgcacgccaacagcgccgagtccgtgctggtccaggccttgctcgacgcaccgctgttcggcgtgcgctggcgttggaacgcgaccaccgcgctggcgctgccgcgcatgaccggtgggcgcaaggtcgcgccgcagctgcagcgaatgaagagtgaagatctgctcgccagcgtcttcccggaccaggttgcctgcctggagaacatcgtcggcgagcgtgaagtacccgaccatccgctggtggcacaaacgttggatgactgcctgcacgaagccatggacagcgaaggctggctggcgctgctacggcgcatcgaggcgggcaatatcgagctgctggcgcgtgacttgccggcgccatcgccgctggccatggaggtgctgggcgcgcggccctacgcttttctcgacgacgcgccgctggaagagcgccgaacccaggccgtgctgaaccgccgctggaccgatcccgagtcggccgacgatctcggcgcgctggacgtcgcggcgatcacggcggtgggtgaggaagcctggccccaggcgcgcaatgcggacgaactgcatgaggcgctcacagggctgggctgcgtcgctgaggcggaagcgcaggccgatccgcaatggccggcctggctgaacgagctggcccgcggcgggcgcgcaacgcggatgcaggtcgcgcaggaccgtgcactctggttgcccgtcgagcgtctcgcgctgttgaaatccatctaccccagcgctcggtgcgaaccagctctcgaacccttgcccggcttcgatcagcaatcgagcgaggatgatgcgctggtcgagctgattcgcgcgcgcctgaccggcttcggccctttgcctgtaccgctgattgcccggccgctggccttgccggcctcggcggtcgcgctggcgctcacgcgcctggagtccgaaggctatgtgctgcgcggccgtttcacgcccggcgcttgtgaggacgagtggtgcgagcggcacctgctggcgcgcatccaccgttatacggtcaagcgcttgcgccgcgagatcgaaccggtggagcgcgccgacttcatgcgttttctgtgcgactggcagcacctgtccgagtcgacgcgcatgcagggccgtgatgcgctcgctacggtagtcgagcaactggagggctttcaggctgcggcgggcgcctgggagagcgatctgctgcccgcgcgcctgaaggactatggcggcacctggctggacgagctgtgccgctccgggcgcatagtctggacgcgtctggccgggcggatcaaagccagcagcggcccggtgcgcggcacgcccatcgtgctgctgccgcgccggcaactggcggcttggtatgcatcggccagcgaggcgccgccaccggagttgtcatcccgcgcgcagcgggtgttcgagacgctgcaggggcagggcgccttgttcttcgacgaactgcagcaggacgcccgcctgttgcgcagcgaacttgaggatgccctgggtgagctggtcgcggtcgggctggtcaatgccgacagcttcgccggtttgcgtgcgttattggcgcccgctgcgaagcggtcacgcagcacccgacagagccgcggcggtgccttcatcggcggcatggccgacgccggtcgctgggccctggtgcgcaagggtacgccggcaccggctgattcctcggctcgccggccggtgctcgatcccgaagcgctggagcacattgcgctgaccttgctgcgtcgctacggcgtggtgttctggcgccttctcgaccgcgaggccgattggctgccgccctggcgagagctcctgcgtgtctaccaccggctcgaagcgcgcggtgacatccgtggcggacgtttcgtcgcgggcgtgccgggcgaacagttcgccttgcccgaggcggttgctttgttgcgcgaggtacgcaagcgaccaccgatcggcgagatgatcgccgtctcggcggtcgatccgttgaatcaggtcggcacgctgctacccggtgaacgagtaccttcagtgccgggcaaccgcatcctctatcgcgacggcgtaccgctggcgctgctgattgccggcaaaccggagctgttggcggagctgaacgaagacgaccagagaaaggcgaggcagctattggcggtggccaggcgatagcggatggcggtgaagatggtgggaagcaaacagcgcagcccaggggctgcattcgccgcggggcgcgactctcacaggggttagcgtgggccgaaggcgttccgtaggagccccgaccccggtgcgaagggtgggtgcgatgcggagctgcggttggaagcgatgagctaaaggcgcagccctttgggctgcattcgtcgcgggtcgcgacccccacaggggtcgagttgagccgatgggcttttgtgggagccccgaccccggggcgaagggtggggacgatgcggagcagcggtcggaagcgaggagctaaaggcgcagccctttgggctgcattcgccgcggggcgcgactcccacagggatcgagttgagccgatgggcttttgtgggagccccgaccccggggcgaagggtgggtgcgatgcggagcagcggttggaagcgaggagctaaaggcgcagcccaggggctgcattcgccgcggggcgcgactcccacaggggtcgagttgagccgatgggcttttgtgggagccccgaccccggggcgaagggtggaggcgatgcggagcagcggttggaagcgatgagctaaaggcgcagcccaggggctgcattcgtcgcgggtcgcgacccccacaggggttagcgttggccgaaggcgttccgtaggagccccgaccccggggcgaagggtgggggcgatgcggagcagcggttggaagcgaggagctaaaagcgcagctctttgggctgcattctccgcggggcgcgcctccaacagggatcgggttgggtcgatgggcttttgtgggaggcccgacctcggggcgaagcggggtggagcagagcagtgcctcaagcaagaacgaagtccaagcgtcaagcttaaaacccaaagctaaaaactcaatccgcgcccaacctgtcgccctccagcctccagcctccagcctccagcctccagccttccttaccccgccaccaacacccgaatcgcttccagccgcagaccggccttctccagcattgccaggccgtcctcacgctgtttgcgcacggcttcgatctcactgtcgcgcacgctcgggttgacggcttgcagcgcggtgaggcgtgccagttcttcgtcgaggctcgctttcagcttgcgctgcgcttcggcgacgcgctcggtgtggcgcggggtgaccttggcttcggcgtcggcgatctgtttggccagtacgtcgcgttgggcctggacgaatttgttggcgctggcgcgcgggacgctttccagctgatcggtgagcgtctcgaacgccaccttcggcgccaggtcgttgccgttcgaatccagcaggcagcgcagcgccaaaggcggcaggaagcggttgagctgcagggcacgcggcgctaccacttcgctgacataaagcagttccagcagcacggtgccgggcttgagtgccttgttcttgatcagcgccacggcggtgttgcccatggagccggacagcaccagatccatgccgccctgcaccatggggtgttcccaggtgaggaactgcatgtcttcgcgggccagtgcctgctcacggtcgtaggtgacggtaacggcttcgtcgtcgccgagcgggaagctggcgtcgagcatcttttcgctggggcgcaggatcagtgcgttctcggaatggtcttcgctgtcgatgccaaaggcgtcgaacaactcttccatgtagatcggcaaagcgaactggtcgtcctgttcctcgatcgcttcgaccagcgccttgccctgttcgccaccaccggagttgagttccagcagccggtcgcggccggtatgcagctcggcttccagtcgctcccgctcggcgcgggcttcggtgatgagcttctggaattcatcatcgtcgccttcttccagctggttcagcaggcgcgggccgaactgatgctgcagggcgttgccggtggggcaggtgttgaggaaggcgttcagtgcctcgtgataccacttgaacagacgttcctgcgggctggtttccagatagggcacgtgcagctggatgacgtgggcctggccgatccggtcgaggcggccgatgcgctgctccagcagatccgggtgggccggcaggtcgaacagcaccaggtgatgggcgaactggaaattgcggccttcactgccgatctcggaacagatcagtacctgcgcgccgaattcttcatcggcgaagtaggcggcggcgcggtcgcgctcaaggatgctcatgccttcgtggaagacggtggccgggatgccggagcgcacgcgcagcgcgtcttccaggtccagcgcggtctcggcgtgggcgcagatgaccagcactttgtacttcttcagcatcttcagcgtgtcgatcagccactcgacgcgcggatcgaagttccaccagcggttctgcgcgtccggctcttcctgctgactctggaagctgacttccggatatagctcggcatgctcgcccagcggcaattccagatactcggcgggacagggcagcggatagggatgcagctggcgctcggggaaaccgcgcacggcggcgcgggtgttgcggaacaggaggcggccggtgccgtgacggtcgagcagttcgcggatcaggcggctgctggcttcgatgtcgccatcggtggccgcggcgagcagggcttcgccttcggcgccgaggaagtcatggatggtctggtgcgcttcctgcgacaggcggccctcgtcgagcagttcctgcacggcgcgggcgactggctggtagctggcactctcggcgcggaaggcttcgagatcatggaaacggttcgggtcgagcaggcgcaggcgggcgaagtggctttcctggccaagctgttccggagtggcggtcaacagcagcacgcccggggtgacttcggccagttgctcgaccagcttgtattcggcgctggcgttttccgggtgccagaccagatgatgcgcttcgtccacaacgagcaggtcccagccggcggcgaaggctgcgtcctgggcgcgctcgtcgtccttcagccagtccagcgagaccagcgcgagctgggtgtcttcgaaggggttgctggcatcgctctcgatgaaacgctcgtcatcgaacagcgcgacctgcagattgaagcggcggcgcatttctaccagccactggtgctggaggttttccgggaccaggatcagcacacgcttggcgcggccagacagcaactggcgatggatcaccatgccggcttcgatggttttgcccaggcccacttcgtccgcgagcagaacgcgcggggcgatgcggtcggcgacttcacgggcgatatgcagctggtgcgcgatgggttgcgcgcgcacgccgcccaggccccacagcgaggaggtcagctgtttgctctggttttccagggtgtggtagcgcagcttgaaccagttcagcgggtcgatctggccggcgaacaggcggtcgctggcgaggcggaactggatgaagttcgacagctgggtttccggcagggtgcgggcttcgctctgtgcggtcagaccgtgatagaccagcaggccgtcgacatcctcgacttcgcgcacggtcatcttccagccttcgaagtgcgtgacttcatcacccgggacgaagcgcacacgggtcagcggagcgctgcgggcggcgtactggcgggtttcgccggtggcggggtagagcacggtgagcatgcggccgtcctgcatgaggatggttcccagaccgagttccgcttcgctgtcgctgatccagcgttgccccggtagatactgctgcgccatgccctgcctcccgctgtaaaaaagcccgctatgttaacggaacactgccgagagagcgacgacagatgccactggattagccttgtcgccgttctcgtttccgctgtgacgaaacgcgaaccgaccctgccagtgtagcgttgctgttaaagtcgtcagcagatcggccgatcaaccggtacaggctcgccagaccaggtgtgcccccggctcgtcggcctgccacgggagagcgaagatgctgccagtcattccacccggcaccgtccaggtcactgcgcaacaggacgtggtcaagccacgacccgatatcgcaccggtgacgccggttcagccgagcgccaacgagagttcggtggggctcgatcgccgtcatcctcaggaagccgagcagatgctgcgcgacgagcagcgccggcgccagcggcggggctatacggcgcaggagctggccgagggtgaaaccgccgaagaggatcaggacgcgctcgaggaactcccgcgtcagggcctctgggtcgacgtcgaggtctgatgcgctcgctcgacggtctcgccataaccctgcctcaggccgatctgacctactggccgcaatgggccgacgccgcgctcgctgatcgctggttgtcggcgctgaccaccgagacgccctggacgcaaccccgaatcaggctctacgggcgccagttcgccgtgccgaggctggtcgcctggtatggcgatcccgaggcgcgctatcgatattccgggctggtgcacgagcccttgccttggacgccgctgctcggtgagattcgcgaacgagtccaggctcaactgggcgagcgtctgagcggcgtgctgctcaacctctaccgcgatggccaggacgccatggggtggcacagcgatgatgagcccgagctgggtcgcgagcctctggtggtctcgctcaacctcggcgcaacccggcggttcgaccttcgccgcaagggaaacagccggatcgagcattcgctggacctggatcacggctcgttgctggtcatgcgcggtccgacacagcattattggcagcaccagatcgcccggacgcgcaaggtaaccgagccgcgtctgaacctgacctttcgccaactctttcgtgagcccgtcttatgagcagtgacgccaagctgatcgacttcagcgtcgagcgtgaaaagcgcattcatgacatcaaggaaaagcgtctggccgaaatgcgccaggcgttcgaggaggctttgccgctggcccggccgaaaaagaaacccaaggccaagcctaagaaacgctgagctcctgtcctcgagctagacgtccactgcgcgatccgagcggctcgatgagtcgttcggcctgcgtcactcgccgcatccccctcttttcttgacccagatcagctaacgcgatgcctggtttgcacggcttcgcggccattgacatcgatcaatttttaaacggcgcggcggggtaacgtacagccatcagacagcacaacggcttggaggcaggaaatcatgttcgtcgataatgtggtgctcgcaggggtggtcacggtcggcctgatggtcgccttccttggcggtttcggatatttcatctggcgggatgctcacaagaagtagcggtcccgcagatagacagagcacgcaaggcatttgggcgacttaggtcgcccttttttttgcctgccattcagcgccgttgctggggttggacgaagacagcggtggtaaaggccggtacttcgaattcgccttcacggaccttcgcctgacggttgatcgggtcgaccgagtcccggagaacgggatgcaactggtagcctgccgcacccggcaggcgaatccgctcgccggttgcgttgaaaaccaccatcagcgattggtagcgacgatctaggtcgtgaccggcgcgaggaccgtccgccaggctgaaggcgatcacgccgggctgctgctcggggccggtgttatggaaccgcagccggcgttccacgtcgcgggcgctgcccagctggaacagcgcgctgtcgctgcggatcttcagcagctcgaggaagccgcgcttggccctgaggatatcggtcgcgcctggcttggcatgcggatcggcaattacctggcgaatcagcggccagttatcgccatccttgtcggctcgcggcaggcccttgttccagttgttgtcctggtagctgaagtccacggcgttgaaccagtcgcccgagtcgtagctgtcgcgttgcatcgacttggagcgcaggatgtccgagccgagatggatgaagggcacgccctggctgaacagcggcacggacagcgccaccagttgcaggcgcacgcggtcgctaacgggcagggtggccggcagcttgtactgattgttgtcccacagcgtctggttgtcgtgcttggaaacgtagttgatggtttcctgcggatcgagcgtgtagccggccggttgcccgttgtagtcgatatcgccccccttgcgaacgctgccgtcggcggtgacgaactggaagtcgcgcaggcctccggcgatcccgacgcgaatcaggtcggcggcgtgcagggcctgggccttttgctccgccccggcgccggccagctcgttcggcagcacgtacagcccattggcgaatccctggttgcgacgaatgctctcgccaccgtcgaaggggctgccgccgcggaccgcgtcgcgctgccgatcgttgaatgtaccgatgccggtgccggccatgttcagttgggtggcattgatgcctcgcgcgttgccggcgacttcgccgaattcccagccctcgccgtagaagtaggtgtgccggtcgatccggcgcacggcccgataggcatcgaccagattctggcgcatgtggtggcccatcagatcgaagcggaacccggcgatcttgtagtcgcgcgcccagacttccagcgagtcgatcatcagcttggccatcatgcggtgctcgctggcggtgttctcgcagcaggtcgatgtctccaccgcaccggtggacggattacgacggtggtagtaaccgggcacgatcttgtcgagcaccgatttgtcggccaggccggaggcgttggtgtggttgtagaccacgtccatcacggtggcgagcccattaccggcaagcgcctggaccatctcgcggaattcgatgatgcgctggacaccctcggcatcgctcgcgtagctgccctccggcgcgctgaagtggaaggggtcgtagccccagttgaaattgtccagggcacgcagatcgttgtacagcgattgcgcctggccgctggccgggtcgaagccctgcagaacctggcgcacgctcgccgcgccgcagtgctgcgaccagtgttcacgagccgttggcgatagctggcagagtttggcgaaagggtcatcgagatcgacgcggcgatccggatcctcgtcgatggtggcgatatcgaacaccggcaaaagctgcacgtgagtgagcccggctttcttcaggtcacgcagatgctgcatgccattgctgcccggccgggtgaaagcgccgtaggtgccgcgcaataccgctggcaggctggtgtcgctggcgctgaagtcgcgcaggtgggcttcgtagatcacgctcgcttcgggacgttcggggtgtggtgggcgcaaggcgtcccagccggcgggcttgaggtcgtcggcgtccaggtcgacgacctgggcgtactggctgttgcgcgagaggctcaatgcataggggtcgcttaccagcgtcgtctcgatcgttccggagcttggccggaaggcggtgacctcgtattggtaatactgtcggtcgagtgagcgaggcccgtcgaggctccacactccgagccgctcgtgcatcactttcgggtaaccggacagcaggcgcttgtcggcgtcgaacacatgtagacgcacgcgctgcgccgtgggtgcccagagcttgaaggcgacgccacgcgggccgaccttcgcacccagttcgccgtcgtaggcgaacagcatgtcgagtatgccggcggtctgtacctgcgtcgcatcgatcacctgatcgtccgcatcgtaggcgaccaccaccagttggctcatcactgcgcggcgcaggtcacgcgctcctgccgcgaccttgaacgccgcggcgctggccaggtgcggatgcgtgcgcttgagcccctcgcgcagggctcccggacgcaggggcagcacggtgccgccgctgacggtgcgcgcgtcgccatcgatcctgatgctggcgtcgggtgaatagcgcaactcgacccgactggccccgggcatgccatcgaccaacgcgagcgtaaacgggtccagccaatgcgcccgtgcgcccttgatcgccacggcggcgcctttcagcggtgtgctggatagttgcgcattgccgctgagggagaagacgcgacgccccaactggtcgaaacgccaggtcaggtcggcgccgcccaggtccttctcgtcgcccctgtgcatgatcaggttcaggcaactggcgtcggcgctcagcgggatgcggtagaaagcgccatattccgggtcggtaccggccgcgggcagcggctggtcccagctcgtctcgttcaggctgccgctgcacgccgcggtgttccacaggtgcggtccccagccgttgtagtcgccgtcggcacgctggtagtagagcaaggcttcgtcagggcctgggtccagcggagccgccgaagcgggttgaagggtcagcgaaaagccgccgaggacgagcgccgccaggcgccggtaagcgatcgagcgtgtgagcatggtgaggtcccggtgttgttcttgttgtaccgcgagctcgatggtccgtgcatggtgggtgatgtgcatcctccatcggcgcgggaggcggggcgtagtcgagggccgtaatagccttgtgctggcaagccttaacggtgcgcgcgcgggatggcaaagcgggttgcgttgacgcaacgagacaaggtgcccgagacggcaccttgattttggtcagtccgtgaggactgcaagtgtcgatccgctgttgcggctcagccgaaagtgatgggcggcaggtctttcagttcgacggtttcctcgcggcgcggcgccagcacttcggcttcgccatcgaccacctgttcgtcgttctgattgaagacacgggtggcgatgcgcacgcggttcttcggcatcttctccaggatctcaaggcggacggtgagggtgtcgcccagcttcaccgggcgggtgaatttcatcgtctggcccagatagatggtgcccggcccgggcagcgtgcaggcgaccgccgcgctgatcagggcgccgctgaacatgccatgggcgatgcgctccttgaagggcgtgccggcagcgaattccgcgtcgagatggaccgggttgcggtcacccgacatggcggcgaacagctggatgtcgcgctcctcgacgcgcttctcgaagcttgcggtctggccaacctcgagggcggagtagggcgtgttgctcagcgtgctcatgagtaaacctctggtgcgggtacgaacgaaagaccgctgcggcggtgcccagtcagtcatgattggcgaccgtggagtcgcgacgtgaccgcattctagagcgcggcggggcgattgtcccggctggcgctcatttgccgccgtggggcgagattcacgtcgctgatttcgtggtcgagctattgcgtggcaatgcggagctgctaagttcgccacagcccgtcgagcgcgggtcagacactctcaggtaacgaggccaataataatgcaacctgacttctggaacgacaaacgtcccgctggtgtgcccaacgacatcgacatggggggcttccgctcggtcgtggaagtattcgagcgctcctgcaagagccatgcgaatcgcccggccttcagcaacatgggcgtgaccctgacctacgccgacctggagcgctactcggcggcctttgcggcctggctacagaatcataccgatctgcaaccgggtgaccgtatcgccgtgcagatgccgaacctgctgcaatacccgatcgctgtcttcggcgccctgcgggccgggctgatcgtggtcaataccaatccgctctataccgcacgggagatgcgtcaccagttcaaggattccggggtgcgggggctggtttacctgaatacgttcggcaagctggtgcaggaggtcctgcccgataccggcatcgaggtgctcgtcgaggcgcgcatcggtgacatgctgcctccgctcaaggggctgctggtcaacaccgcggtcaagcacctgaagaagatggtgcccgagtacagcttgccgcaggccgtttccttcaagcaggtgctgcgtagcggcggccaccacagcctcaagccggtgtcgctgacgctggacgacaccgcggtcctgcaatacaccggcggcaccacaggcgtggccaagggcgcgatgctcagccacggcaatctcgtggccaacatgcagcaggtccgggcaaacatgcagcagctcgacgagcaggggcagacccttatcaaggaagggcaggagatcatgatcgcgcccttgccgctgtatcacatctacgccttcacggttaactgcatgtgcatgatggtgaccggcaaccacaacgtgctgatcaccaatcctcgcgacatcgatggcttcgtcaaggagctgcagaagtggcggttcacggcctttctcgggctcaacacgctgttcgtcgcgctgatggcgcatcgggacttcaagaagatcgatttctcagcgctcaagggcaccaattcgggcggcacggcgctggtatccgcggtagccgagcgctggaagagcatgaccggggtcaccgtgaccgagggctacgggctgaccgaaacctcgccggtggtctgcgccaacccgcagggcgacaagtcgcggatgggtaccgtcgggttgccggtgccggggacgacgctgaaggtgatagacgacgagggcaacgaactgcccttgggcgagcgcggtgagctttgcgtcaagggtccgcaggtcatgaagggttactggcatcgtccggacgccaccgccgaggtgctcgatgccgagggttggctgaagaccggcgacattgcggtgatcgatccggacggcttcgtgcgtatcgtcgaccgcaagaaggacatgatcatcgtctctggattcaacgtgtatcccaacgaaatcgaagacgtggtcatggctcacccgaaggtggccgcgtgcgcggcggtcggtgtcccggatgaaaaatcgggcgaagcggtgaaactcttcgtggtgcgcagcgacgccagcctcaccgtcgaagagctgcaagcctactgtcgggaaaacttcaccggctacaaggttccgcgacatttcgtgttccgcgattccttgccgatgaccccggtcggcaagattctccgccgagagctgcgcgatcaggcctgatcggcgcagactcccgcattccgccgaaagcacaagtgactgagcggcgactgtcagtcactttgtggtctttgttcgggtctgagcccctgttcgggctgtttcaaaactgctaacctcgccccgccttttgaccggaatttccgtacaaaagttaacaaaacacaacaaaacagctgctatatgcagtaaagctgtcgcttaggagtggggttcaatgaccgataacttctggaaggataaatatcctgtcggggtcgaaagcgagatcaatcccgacgagtaccggaacgtccaggctgtgctcaaggcctcctgcgagcggttcgcggacaagccagccttcagcaatctcggcagaaccctgacctacggcgagctctacgagctgtccggcgagtttgccgcctatctacagcaccataccgatctccagccaggcgatcgaatcgcggtacagctgcccaacctgctccagtatccggtcgtcgtattcggcgccctgcgcgccggcctgatcgtggtgaacaccaacccgctgtacaccgcgcgggagatggaacatcagttcaacgattccggtgccaaggctctcgtctgcctggccaacatggcgcacctcgccgaagaagtcgtgccgaaaaccggcatccggcatgtggtcatcaccgaagtcggcgacatgctgccgaccgtcaagcgcttgctggtcaacgcagtgatcaagcatgtgaagaagatggtgcccagctacgacctgcccaaggccgtcaaactgaacgatgccctggtgcaagggcgcaacaagcggaccagcgaggccgatcccgagagtgacgacattgccgtgctgcaatacaccggtggcaccaccggcgttgccaagggggccatgctgacccaccgcaacctcgtctccaacatgcttcagtgtcgtgggctgatggggaccgagctgggcagtggctgcgagaccatggtcgctccgctgccgctctaccacatctacgcctttacctttcattgcatgacgatgatgctgatcggcgcacacaatgtgctgatcaccaacccgcgcgatctgccggccttcgtcaaggatctgcgcaagtaccgcttcaccggctttgtcgggctcaacaccctgttcgttgcgctgtgcaacaacgaggagttccgcaagctggacttttccgggctgaaggcgaccttctcgggcggaatggcgctgcagctggccgcggcagagcgctggcagcaggtgaccggttgttcgatctgcgaaggtttcggcatgaccgaaaccagcccggtcgtttcggtcaatccgttcagcggtatccagatcggcactatcggcatcccgatgccgtcgacgcaatgcaaggtcatcgacgatgaaggcaacgagttgccgatcggcgcgaccggcgagctttgcgtgaaggggccgcaggtgatgaagggctactggcaacggccggaagccaccgccgaggtcctcgacgggcagggctggttgaagaccggcgacatcggcatcatccaggacgacggctacatgcgcatcgtcgatcgtaagaaggacatgatcctggtgtccggtttcaacgtctatcccaacgaactcgaagacgtgctcgccaccctgccgggtgtgctgcaatgcgcggcgatcggcattccggacgagaaatccggcgaggcgatcaagctgttcgtggtcgtcaagccgggcgaaagcctgaccaaagagcaggtcatgcagcacatgcatgacaatgtcaccggctacaagcggcccaagaccgtcgagttccgcgacagcctgccgaccaccaacgtcggcaagatattgcgccgtgagctacgcgatgaagagctgagaaagctcggaaagaaatagcagctgcggctgtacgagagccccgcttcggcggggctttttcgttgtttcggcgccgtttattttatcgctgctgcggcgttcgggctgttcccgttgcgctggcgaactgacacaatgctggtattaatccgcacaaaaaatggggttttgccgaaatgttgtcgaagctgcgtttgcgaggaaagttgttgttactgggagtggcgccgacgttacttctcgccgttctgctcagcgggattgccgtctacgaactgcgagacctggcgatccggcaggaggctcagacgcgcgaaagcctgacccgagatcgccgcgccgaactcaagcattacgtcgaggtggcgcgcaccgcgatcgggccgctttacgaccgctccgccgacggcgacatggcggcgcgcgccgaggcggtgcggctgctcgaagcgctttcctatggcgaaggtggctatttctggggttacgacgaccaggcggtgcgggtgctgcaaggcaacacgcaggacaagatcggccagagtttctacagctatcaggaccccaacggggtctacgcgattcgtgatctggtcaaggccggccaggacgggactcactacgtccaatacagcttcgagacgccgggcagcaagacgctcgtgccgaagatcggttacgccgagtacctgccgaagtggaagctggctttcggcagctccttgaacctcgatggtgtggagcgtgatgtccaggcggcacgcgaggtgttccagcaacgcatcgaccggctgacaggcatcatgctcggctctgccgccgcgctgttggcactggtcgccgggcttgccctgttcatgagcagtgcgattctgcggccactgttgcaggtcaagcacaacctcgatgacatggcggccggcgacggtgacctgacccagcgactgccagtggccagccgcgacgagctgggcgaactggccgcatcgttcaaccgcttcgtcgagaagattcactcactggtgcagcaggtcgccggcaccaccacgcagctcaccggactggtgggcgcggtggccggtcaagcgcaacgctccgaacaggcgatggccgatcagcgccacgagaccgaccaggtcgccaccgcgatcaacgagatgtccgccgctgcccacgaggtggccatgagtgcccagcgcgccgcggaagccgcgcaacagaccgaccagcagggcttggcggccaagcaggtggtggatcgcagtatcgagcagatccatgagctggtaggcgagctgcgggaaagcggtacgtcgctcgccgggctgcagcaggacgtacacggcatcgtcggcgtcctcgacgtgattcgcgcaattgccgagcaaaccaacctgctggcgctcaacgccgcaatcgaagcggctcgtgccggggaagctggacgaggtttcgccgtggtcgccgacgaagtgcgggccctggccagtcgtacccagcagagcaccggcgaaatccagagcatgatcgatcgtctgcaaacggctacctcgcacaccgtggcgaccatgttgcgtgccggcgagaaaggcgaagcgacccgccagcaggccaatcaggcgggcgaatccctggacgccatcgcggcgttgatcggcacgatcaattcgatgaacgcccagatcgccagcgccgccgaggagcagaccgcggtggccgaagagataaaccgcagcgtgcaccacatcgccgatgcggtcgacggcgtggccaatgatgcggccgagggcgcccagaccgcgcgcgaactcaatggactgggcgaacgtctgcaacggctggtcgggcagttccgcgtttgagcacatggggcgcccgggcgccccgcagcgaggctcgctgaagtgctcgtacggcgcttcagaccgagcgaccaacggtagcgcaaccgtcgtccagcaacgaacccctggtcaggcgcagcggtctagtcccctatggccgcgtccactttgtgcagtaggggacgatggcgcatgccatttcgcggcctgcccatcaatctcgttgcaaggatgagttacccatgcagaagaaaaacaatgcacgtcgggtagttgcttctttcgctttattcgcctcgaccgcagccctggctgcacctgccgccgagcccgccgcgttcaacgaatactggtctcccggcaagcccgattcccgcatctgcaaatcaccgctgctggtcggaacgccgctcgggctgccacgttgtatgcaggcgagcaatatcgtgacgcacctgcagaacctgcaggacatcgcctccctgaaccagggcaatagagcgtcaggcctgtcgggttatcaagcctcggtagactacgtgcgtagcacgctcgagcgcgccggttaccgggtcagggtccaggcattcccgttcctggcgttctatcccgcaggaccgggcacgctggcggcggtgacgccgcagccggtgcagtacacctgggaagaggatttcacctacgccgaccagaccgatccgggcaatgtcaccgcgccggtggtgcccgtcgatctggcgctggggctgggaaacacctcaaccagcggctgtgaggcgtcggacttcgccggcttcccggcaggtgccattgcgttgatgcagcgcggcacctgcccattcggcgacaaggccaccaacgcggcggcagccggcgcggcgggggcgatcatcttcaatcagggtgataccgaggaccgcaagggtctgctggtcgccaccctgggcgaggactatcagggcggcattccggtgatgttcgcgacctacgataacggcgttgcctggtcgcaaaccgatgggctgcaactgagcatgagcgtcgatgtcgtccgcaagcagtcggaaacctacaacgtgctggccgaaacccgtcggggcaatccgaacaacgtggtgatggtcggtgcgcacctggattcggtcttcgaagggccgggtatcaacgacaacggctccggcagcgccgccctgctggagatggccacgctgatgagcaaggcgcatccgttgaacaaggtacgcttcgcgtggtggggcgcggaggagtcggggcttgtgggttcgacttactacgtcaaccagttgccggaggaggagaagcggcagatcaaggcctatctgaacgtcgacatgatcggttcgccgaattacgccaacttcatctatgacggcgacggttccgacttcggcctgcaaggcccgcccggctcgggtgccatcgagcgtctgctgcgcacctacttccagctgcgcaacgcgccatccgaaggcaccgagatcgacttccgctccgactatgcccagttcttcgacgacggcatcgcctttggcgggctgttcaccggcgccgaggacatcaagagcgtggaccaggcgcagcgctatggcggtacggcgggggaggcgtatgacccgtgctaccacagcgcctgcgacaacctcggcaacatctccagcgaggcgttggaactgcacggcgatgccttggccttcgccaccagctggctgtccctgtcgaccaagatggttgacgatgagatagcggcagcagccgagcaaagcatcggcacactgcgcgtccagaaggtacaggagaagtcccgctggggtcattggatccgttgatcgcctgatcaccgcgccggttcgccggcgcggtctttccgcaatccctttccttacggccagccgggcaaatctgcgacaatcgcgcccttcacgaaatcgcatacggctgtccatgaccgacgcaacgccctcgtttgaacaactcctgaaaaacctcgaccaggcgatgttcgctgaccgccatcgcttgcgtcgtcagctgcacgacctgcgcaagaaggccggcgatgcgccgatcgacgccgaacgcctcgcccagtggcttgagcgtttccaggcatcggtggccaaggtcgaggcgcggcgccagagtgtgccggtcatgcgctacgacgacagcctgccgattgccgccaagcgcgacgagatcaaggccgcgctggaaaagcatcaggtgctggtgatcgccggtgaaaccggctcgggcaagaccacgcagttgccgaagatctgcctggaaatcggacggggtgtgcacgggctgatcggccacacccagccgcgccggttggcggcgcgcagcgtcgccacgcgcgtggccgaggagatcggcacgccgctgggtgagctggtgggttatcaggtgcgcttcgaggaccagagcaaggacagctcgctgatcaaactgatgaccgacggcatcctgctggccgaaacgcagcacgaccgcttcctggaaaaatacgacaccatcatcgtcgacgaggcccacgagcgtagcctcaacatcgacttcctgctcggctacctcaagaccctgctgccgcgccgtcccgacctgaaggtgatcatcacctccgcgaccatcgacctggagcgcttctccgagcatttcagcggggccggccgtccgggagcgcccatcgtcgaagtgtcgggccgtacctatccggtcgagacctggtatcgcccgctgtcggcggaagtcgacgaagacggcaaccgcgtcgaggacgatctcaccgtcgaccagggcattctcgcggcgctggacgagatcgacgcccatgaaaagagcatcggcaagcgcccaggcgacgtgctggtgttcctgcccggcgagcgcgagattcgcgacgccgccgaagtgctgcgcaaggccaacctgaaattcaccgaggtgctgccgctgtatgcacggctgacgccggccgagcagcagaagattttccagccgcggccgggccgcaagatcgtgctcgccaccaacgtcgcggaaacctcgctgactgtgcccggtattcgttacgtgatcgactccggtacggcgcggatcagccgctacagctaccgcgccaaggtgcagcgactgccgatcgaggcggtgtcccaggccagcgccaaccagcgcaagggccgttgcgggcgggtcgagccggggatctgcattcgcttgtacagcgaggaggatttcctcggtcggccggaattcaccgatccggagatcctgcgtaccaacctcgctgcggtcatcctgcagatgctgcatctgcgcctcggccagatcgaggatttcccctttatcgaaccgccggacggcaaggccatcagcgatggcttcaacctgttgcaggagctttcggcggtcaatcgcgagaatcagctgacgcccttgggccgccagctggcgcgcttgcccatcgacccgcggctgggtcgcatgctgctcgaagcggcaaagttggggagcatggccgaggtgctgatcgtcgccagcgcgttgtcggtgcaagacgtgcgcgagcgtccggccgaccgtcagcaacaggccgaccaggcgcatgcgcaatggaaggacccggattcggacttcgcagcgctgatcaacctctggcgtggcttcgaggagcagcgccaggcgctgggttcgaatgccttgcgcacctggtgtcggaaaaactttctcaactacctgcgtcttcgcgagtggcgggatgcgcatcgccagctgaccctgatcgtgcgggaactcaagctcgacgcccagctacgcgccgagcgcgagcgaaagggcgcggaagcaacagctcgcggtcaagaccgctcccacaaaggcaccgacactccccgtgggagcggtctcgaccgcgaagagcgcaacgccggcgcagaagatcgtggtcaagaccactcccacgaaggcgctaacactcaccgtgggagcggtctcgaccgcgaagagggtggcaccggagcaaaagatcgcggtcaagaccactcccacaaagacaccccggctcgtgggagcggtctcgaccgcgaagagggcagcgccggcgcagaagatcgtggtcaagaccactcccacaaaggcgccaacactcaccgtgggaccggactcgaccgcgaagaggggcccgccggcgcaaaagatcgtggtcaagaccactccaacaaaggcaccgacactcgccgtgggagcggtctcgaccgcgaagtgggcaacgccgaaacgaaggcggacaccgggcaaaaagaccgcgcccatgccgaggggccagtgcgcaccacggacaagcgagtcaatgccaagctcgtccagcaagccgaagccagcgaggccgccgtgcgcgccaaaagctacgccgcggtgcacaaggccatcctctccggcctactcagccaggtcggacacaaaaccgaggagggtgactttctcggcgcgcgccagcggcgcttctgggtgcatccgtccagcgtgatcgggcgcaagaagcccaactggatcatggccgccgagctggtcgagaccaccaagctctttgcgcgcatggtcgccaagatcgagccggactggatcgagccgctggccaggcacctgatcaagaccaaccatttcgagccgcactgggagaagaagcgcgggcaggtggtcgcgttcgaacaggtcaccctgtacggcatgatcgtggtcgcccgccggccggtgcacttcggccccatcgacccgcctgccgcgcgtgagcttttcatccgcgaggggctggtgcgtggcgaaatgcacagccgcgccaaggcgctcaccgccaaccgcgaactgctcgagttgttcgacgaattggaagccaaggcccgtcgccgcgacatcatcgctgacgaggacacgctgttcgcctattacgacgcgcgcctgccgcaggacatctaccagaccgccagtttcgagacctggtacaagcgcgaaagcgccaagaacccgcagctgctggtcatgcgtgacgaggatgtgctggcgcgagacgccagtgaagtcaccgctgcgcagtacccggaccatttgcgtatcggcgaactgcaactgccgctggaataccatttcgaacccaaccacccgcgcgacggcgtgacgctgcgagtccccgcgccgctgctgccgcaactccgtgccgagcggctcgcctggctggtgccggggctgatcgaggccaaggcggtagcgctggtgcgcaacctgcccaaggcgattcgcaaaaacttcgtcccggtgccggatttcgtcaaggctgcgctctcgaagatcaccttcggcgagggcgcgctgccggatgcgctgggccgcgagctgctgcgcatgaccggtgcgcgcgtgccggacgaagcctgggcggaagcggccctggggctggagagccatctgaagatgaatatcgaggtggtcgatgcccgtggaaaattccttggcgaaggtcgtgatctggccgagctgacggcgcgcttcagcgaagccagccaggccgcattggcgccgccgcagcagaaggccgaacagaaaccggtcgaggccaagggctttgcacaggtggcggaaaaggctcaggcgaagatggccggcttgtcgatgacggtctacccggcactggtcgaagaaaatgcagtggtcaaggaaggtcgtttcccgacccaggccgaggccgactaccagcatcgccgcgccttgcagcgcttgctgctgcagcagttggccgagccggcgaaatacctgcgcaacaagctgccaggcctcaccgagctggcgttgctctatcgcgacatgggcaaggtcgatgcgttggtcgaggacatcctgctggcaagcctcgacagctgcatcctcgacggtgaagcccagttgcctcgcgacggcgccgcgctggcgtcactggccgagcgcaaacgcggtgactgggcgacacacgccgaacgcttggcgcgcctgacgctggatattctcaagctctggcatgggctgcagaagcgtttcaagggcaagatcgacctggcccaggcggtggcgcttaacgatatcaaggcgcaactgggcaatctgatctatcccggcttcgtgcgcgaaacgccgaccgaatggttgaaggagtatccacgctatctcaaggccatcgagcagcgcttcgaaaagatcggcgcgcaactgcaacgcgaccgcgtctggtccggcgaactggccggctactgggagcagtaccaggcgcggctgaacaagcatcagcaggagggcaagcgcgatccggaactggcgttgtaccgctggatgctggaggaatatcgcgtatccctctgggcccagcagctggggacgaaaatggcggtgtcggacaagcggctgaacaagcagtggagtcaggtcgaggcttgatgtttttgggggcgggccgggacgaacggaccgtccatcggcgcgctcgttcgccaaccgcgccgccccgctttcggtgctccctggggcctacagagtgcctgcgctatttgctggtcagcgcgcctgcgacgaattccaggcgatcctgcccgaagaacatctcctcacccacgaagaaggttggcgcaccgaacacgccgcgttgcacggcttcttcggtgttcgccttgagcgcattcttgacctgatcatcggagatcagagcgcggaattgctcggaatcgagcccggcttccgtcagcacagccgccagtaccgcctcgtcgccgaggttgcgctgatcgatccagagcgcgttgaacagggcttccaggtagcgcgcaaagtcttcgggtcgttgcatctgatagccgattgcgccgcgcatcagcgccagggtgttgatcgggaaatgcggattgaaggcgaacggcacatcgtagcgacgcgcatggcgcagcagatcggtggccatgtagcggcctttggctggaacagcggccggcgaagaattgcccgtggcttggaatattccaccgagcagcatcggccgataatgcagcgtcgcgcctgtgctcgcgcacagtgccggtagctgggtccaggcgaggtagctcgccgggctgccgagatcgaagaaaaactcgagggtcttggtcatctatgtcgctccggttggggttaccagcgctcggtccaggggcgcaggtcgagttcgaaggtccaggcgtcgcgtggctggctgtgcagatgccagtagttgtcggcgatatgcgctgggttgaggatgccgtcctggtctttcagggcataacgctcgggaaagctgtcacggatgaatgccgtatcgatcgccccgtcgaccacgacgtgcgcgacgtggatgttcatcgggcccagttcgcgcgccatgctttgcgccagcgcacgaatgccatgcttggcccccgagaacgcggcgaaaccggctgagccgcgcagcccggcagtggcaccggtgaacaggatggtgccgcggccgcgagccaccatccgcttggccaccgcctggctggtcaggaagccagcgaaacaagccatttcccagatcttgaaatatttgcgcgcggtctcctcaaggatgctgcacggtacgttcgcgccgatgttgaagaccatcacctcgatcgggccgatgtcgcgctcgatggtttcgatcagctcggctacctgatcttccttgcgcgcatcggaggcgaagccatggccgcgaccgccctcggcgatgatgctgtcgaccagcggctgcagcttgtcggcgctacgccgggtgacgcaagccacgtagccttcgcgggcgaagcgtcgtgcgatggcagcaccggtagagtccccggcgccgatgatcagggcgacgcgattgttattctccatgggttcgctctcttgctaaacggtcgttaggtaaacggacgttatgttaagcttcgcgactcgtcaaggtcgccatgagggcgtgtcgcatgcgttattccgccagccataaagagcaaacccgacagcgcctgatcgaaagcagcggcgcgatcgccaagcgcggcggcttcgccacgaccggcgtcgatggcctgatgaaagccatcggcctcaccggtggcgcgttctacagccatttcccgtcgaagggcgacctgttcaccgaagtcgtccggcgcgagttatcgcaaagcccgatcctagcgcgagacggagtggccgatcggacccggctggaacgctgcctggacgcttacctgagcatggcgcacctgcacaatccggaagcgggctgcgcgatcccggcgctgggtgcggaaatcgcccgtgccgagacgccggtgcgcgaggaggccgaacattggttgcgcgccttgcagcaggcctgggcgcagacgctcggtgatggcgagctggcctgggcgttgatcgcgcaatgcgtcggcgcgttgctcgtggcgcgcatgctggctagcgaagagacccagcgggaggtgctcgacgcgagcagaagcatgcttcattcggctttgtcgcaatgacgtggcggcaggtaggcacccgagcgaatgcggggcgggtgcgcgaggcacccaatatagggcgcctcgcttgttgcgagcgactagaaccggtaattggcgctcagctcgagtgtccgtggcgcgcccgaggtgatcaggtcgaccgagccgtgggccgaggcgtagtactccttgtcgaagacgttgaacaggcgcagtgctgcgtcccacttgggttgctgatagaacagcgctgcatcgaccgtggtgtagccaggcatctcggtttcgttatccagcgcggtatatcggctgccgacgtagttggcgcccatgccgacgcgccaatcggtatcgagtgagcgcaccgcccacaggttggcgctgtggcgcggcgtaagcgtcggcacctgcccttcgttgtcgacaccgttggtcttgctgttcgacttggtgatctcggcgtccaggaaggagtagccgccatagagctgccacttgtccgagagctggcccatgaaagtggtttcgaacccgtcggtgcgctgctcgcccgccagcaccagcttggccggattgatcgggtcggtggtcttgatgtcggtgcgctcgaggcggaataccgcggcggtcagcatcagccggtcctgcaacaggttccatttggcaccgatttcgtagtttgtggtttgctccggctccagctcgacgttggtcgcgctgacctggaacatctcgcccgatggttgataggagcggctgatcgacaggtaataggactgcgcgtcatccggctgccagaccaggcctgcgcgtggactgagtgtgtaatcggtccgctccagctcggccttgccgttgagatcgtcgcggaaggactggtcaaactcgtcgtagcgcacacccagcagcgccttccagtggggcgacagttcgatcaggtcctgcacgtagaggcctgtggtttcctgggtgttgaggccgtcaccggtcttccggttggcctgggacggcaccggtagcagcgtatcgccataaacgggcacccgcgcgacatcgtcctggttgtagaactgttggtctttctcctggcggccaaactccacgccatagagcagctgatgattcaggccggcgatcatggcgttctgcttgagttcggtctggttgaaccagccgtcctccttgcgctggacattgccacgcttgagcttgaccagcagcgtgccgtccggcgcggtgacgaagcggttggcatcggtgtgcgccagggtgttgttgcggtccagatcgtagtggtaatagcgactggtattgctcaacgtgaaggtatcgttgatgcggtagtcgatgccggccgtcagcgagaagacttcgcttcgggtgtaatcctgactagcgttggcagaaccgaagcgcttgtcgcggtcgacgtcgacggggcggccgttgagggacgggataccgaagtcgatcaggcgcttgtcgtacaggtacgacgcgccgaggttgatctccaggtcatcggaaagctggaagtaggcagatggcgccagcgccttgcgttccagaaagccatcttcacggaaggtatcgctgtcttccagcgcgccggtcacacgaaacgccttgtttttctgctcctgatcggcccagccggaatcgaactgggtacggcgcttgccttcgctgtcgaagctgacgcccacctcctgcaccggtgcgaaggttggcttcttcgtcacgctgttgatcagcccgcccgacgaaccgcggccgtagagaaccgccgccggccccttgatcacctcaacgcgctcgatgttcgacatgtcccggaagtagagcgcgtcgtcacgaatgccatcgatgtactggtcgccaatggcgctgaagccgcggatggtgacctggtcgcgttgcccgtcgccgttgctcaagccgatgcccggaacgttcttcagcgcgtcttccagcgagtcggcgccctgatcgcgtagcacgctttgtggcaccacgttgatcgattgcggaatgtcgcgcaggggggcgtcgatcttcagcgcagccttgctctgctcgggtttgtagccggattcctcacgactaccggtcaccgaggtgacgggaagttcgatcggtgaggcgggctgggcatatacgacgggagtcgccagggcggtgagcaatggcaagaggcgggttgcgtttgatggcacggtgtcatcctccagggaaagggaggcgacaatagctgtatgtaaattgaatgtaaatgatacgagttatcattagcattcacttgttcgggctcatgcgtgcggtgccttgagcgaagccgagcccggcgctgtcgccggtgtatcggcgtcggcgaagcggtccattcgctgcagctgcccggccttgtcgagcctgagtcgcagcaggtcctcggcgagtatcagctgcccactgtagtggcgggccgcctcggcgcggatgtcctcgacagaaagtccgcgtcccgggatgttctggtagcgcgcgctgaaatgagtcagtaccaggttcggaacgccgatttcggctgcgaatgcggccacctgcgcggcggtgctatgaccgaactcggccttgccggcctctgcgaccgtttgcgtgtaggtggcctcgtggaccagcagttgcgcaccctggcaagcctcgcggagcagttcgggacggtcgttgtcgccgccgacgacgatgcgccgcggcatacgggtcggcagcaggtaatcctcgctgtgcaggatgcgtcccgccagctcgacgtcgttaccgtgcaccagcgcaccccaaagcgggccacgcgggatgccctcgcgatcgagcctctccacgtccaggcgtgggtccgggcgggtttcggtgaagctgtagccccagctcggcacacggtgggagagggcggtggcttcgacgcgcatctgctgattgcgccaaccgttcagggtttcgacggcatggaagcgcaattcgtaaggcagtccgctctgactcatggccagggttgcgcgtatccagccttcgatcgcagcgggcgcgatgatgtccagcggctgctgtcgccgcgccatgccggcgctggcgagcaagccaggcaggccatagcagtgatcgccgtgaacgtgggtgatgaagatcgcccgcagcccgtgaagcgtcagcggcgtacgcaacacctgatgctgcgtgccctcgccgcaatcgatcaggtaccagcccttgctgctgtcttcgagcagagcaaggccggtaacgtttcgggcgcgggtaggggtgccggatgaggtgcccagaaacagcaagtccacgtgcgagctcctcactaatcgggacgtcggatggcgagacagaatgccgcagataaggctgcgagaggctgaaccgccgcagttcgcctacttatgcttttaagctactaagaaagtacaaacttatattaagaatagctaactcatgccgttatgctggccgccttcgatacggccgctggcccttgatcaggatcgcatgatggagtttggtgttcttggctttgtgatagcaggcctggtggtcgggttcatcgtcggcatgaccggggttggcggcggctcgttgatgacgccgatcctgctgtggttcggtgtcaatcccgccgccgctgtcgggaccgatctgctctacgcggcaatcaccaaggccggtggcgtgtgggtgcaccagaaacaacgcaacatcgactggcggatcaccggctacctcgccgcgggcagcttgccggcagcggcgttgatgctctgggtgctcaaggggttgcactctgatcaggaggcgctcaacgcggtcatcaagcagtcgctgggtgtcgttctcgtgctcacggcgttggctgtgctgttcaagaagcgcctgctggcgatggcatcacgcctgtccggagccaccccgcgcctctcgccgcgtggcttggatgtgctgaccgtcgtggtcggcctggtgctcggggcgatggtgacgctgacctccatcggtgccggtgcgctgggcaccgtggccttgttcttcctctacccgctgcttaccacccgtcgcttggtgggcaccgaaatcgctcatgccgtgccgctgacgctggtggccggcctcggtcatgcaggcatgggcaacatggactggaccattctggcctatctgctgatgggctctttgccgggtatctacctgggcagcaacctgtccggtcgcgtgccggacgctgtgttgcgcccatgcatggcggtgatgttggcgatgatcggctataagctgatctgaccgcagcctttcagggaggcgcgacgctgcgcgcgctccgtcatggatctcgtcgcgatcggcgttgccgtaccagcatgacgaccgccacgttccgcttctacgccagactcaacagcttcctttcggccgaacgccgcgggcaatccttcgcttgctcctgcgcgcgtgcagccaccaccaagcacatgatcgaagccctcggcgtgccgcatacggaggtggcgctggtgctggtcaatggccagccggctgacctcgagcgggctatcgccgatggcgatcgggtggccgtttaccccagattcgagcagttggacgtcagttcgctgagcgacttgcagtctttgccgtccggcccgccgcgcttcgtcgccgacgcccacctcggcggcctggcgcggctgctgcgcatggccggtttcgacacgctgtacgacaacggctacgaagatgcggcaatggtggagctggccaatcgggacgccagggtcttgttgacccgtgaccgtccgctgttgatgcaccgggcggtgcgccatggctgctatgtacatgcgatcaaaccccaggctcagctgcgtgagctctaccagcgcctcgatctggccgcccatgctcggccgttcagcctgtgcatgaactgcaacgcgccgttgcatccggtggacaaggccacggtgctcgatcgcctgccacccagggtgcagacgcgacatcagcgcttcctcggttgcgatcgatgtgggcggatcttctgggagggctcgcactggcaggacatgcgcgccttgctcgaatcgatgacgttcgttgactagcgtgcggttcctgtcggtcgatgcccctctaaatgccttggagccgcccatgcagcgccacccgcgggcctatatcgcgccggccgtctcgctgcttgcctccggggttgtctgcctgcgattggccttgcctcgcaagcgagcaccttcgtgtggatggcgcccggcttcctgctgacaggcggggtgctgatgtggctggggctgcgtcgccgggcccgctgatcgaacgaacggatcattgccgcagcgtgccacgccccgcggcgcgctggttggagtggtagatgttgtccggagcaagcgcctgtccatcccggacggcttgcaaccactcgtccgtgctcgccaccgcggcgaagccggtgttcatcaccacggtaaaggctcggtggatctcctcggcgctggccttgccggcagcgttctcgtagggcagcgagccgctggcgtcgtgcagcagctccactttccagccctcgtggtgcgcctgaagcacggtcgaagtgtcgcagttgtgggtcatgtagccgaccaccgtcagggtgtctacctgccgctcgcgcaaccaggtaccgaggttggtcttcgtcagggcgctggccagggatttctccacgagaagatcgaatgggcgctcggcgacggtcgggtgcagctcggcctgctggctgccgcgggcgaacaatggggaagtttccggagcgatgtgctgcacggccaccaccggaatccctgcggtgtgagccgcgtccatggctctggcgatgttgcccagcgatagctgcacgtcgggatattcgatgcgcaggctgccagtgacgtattcgttctgcacatcgatgacgatgagtgcgcgtttgggctggttcatgaagcggtccctttgctggtggatgtgcagcgattgtgtcgtgcatggcgcgcatcggtgagtggcccgcaagacatcttgcgttagcatcgggccaactcatccgccaggactcgccatgcagccgcaccgaatcgccgtggtcgccttcgaccagatcagtccgttccacctgtccgtgccttgcctggtgttcggcggtgaaggctcggaggagctgggctatgtcgtcgaagtgtgcgccgccgagccaggcgccttgcgcaccacggcagggttcgcgctgcaggtggcgcatggactggaagcgctggaacgggcgcagacgatcatcgtgccgagctggcgccatggcgatgacccgccgccgtccgttctgctcgatgcactggtcgccgcccatgcacgcggggcgaccctcgtcggtctctgcctgggcgcatacgtgctggccgccaccggcttgctcgatgggcgtcgcgcgacaacgcactgggcctgcgtcgagcacttcacggcgcgccatcctacggtgatcgtggatgccgacgtgctctatctcgacgacaacaacctgctcacctcggcaggcaccgcggcggccctggattgctgcctgtatctgctgcgcaagcattggggcgcagtggtggccaatcgggtggccagacgcctggtgatgtcgccgcaccgccagggcggtcaggcacagttcatcgaacaaccgatgccggcccgtcgccgcgatacgcgcctgggcgaactgctggattgggcgcgggccagcctgcaccttccacacactctggacagcctggccgagcgggtggtgatgagccggcgcaccttcacccggcattttcgtcagcacaccggtaccacggtcggcaactggttgctggcggagcggctggcgctgagccagcggctgctagaaagcaccgaccagcctatcgacaccatcgcctcgctggccggattcggctcctccgcctcgctgcgtcagcacttcagcaaggcctttggtgtatcgccgcggcattaccggcaagtgttccgcgggtgaccgtccggtcaccgtttcgcctgataggcggtcgtcaagctcccgctcggtatgtcgatagctagcgaaatgaattcgtcagcccaatcggctgggtacaggtaccgtggaatgctcgacaacatcacttttcgcctgtttcggctaagccagagcagcatcgacctgctcgttatcgcggttatcggcatcgccgcgttggggctgttcgttgaaatcgaactctatgaaacgatcaaccggttccacgccacccatgaggcatgggaggcggacgaaatattcatggcgttgctggtgctcggctggtgcggcttcgcgttcggcgcgcgccgtgtgctcgagctcaagaaggagatccgcagccgcaggcaggccgagctggcagcgcacctgctggccacccacgactcgctgacgacgctacccaaccggcgcgggctggagctgagtttcgctggaagcatgcgatgcctcgacgagccgttcttcgtagtcctgttcgacctcgacggcttcaaggcggtgaacgacgtccacggccacgcgattggcgaccagttgctgcagaccattgcccagcgcctgggtatcgccttgcccgagggcgacttcgcctgccggctgggcggcgatgaattcgccctggtgctgcgctcgaccaagacgccggcagctgcactacagctgatcgagcaactggcgggcatcatttcccagccagtcgttctcgactcggtgcggctggtggtgcactcgacctatggcgtcgcccagtttccccaagatggccaggcgctcgacgagctgatgcgccgcgccgacctggcgctgtaccagggaaagcacggcggcaagaaggtcatccgtttcttcgacaacaccaccgaccaacacctggaagagcaatcccgggcggcgcagctggtgcgcgaggccctcgacaatggctacctgcgcactgtctatcagcccatcgtgagcctggccgatcagcaggtggtgggcttcgaggcactggcacggctgcatcatccgattcacggcgaagtctcgccggtacagttcattccggccgccgagcagagcgggctgatccgtgaattgacgtcgaggctgctcgaaatcgcctgcaccgatgcgctcgcctggccggcgcagctgcacctgtccttcaacctcagtgcacacgacctgcaggatatcgatctcccggagcgcatcatgacgatcctcgagcgggtcggtttcccgccgcagcggctggaggtggaagtcaccgagacggccatcgtcaaggacattcccctggcccgcaaacacctcgacacgctgcgggcactgggcattctcatcgtcatcgacgatttcggaacgggttattcgagcctggcgcagatcagtcgcttcagcttcgacaagctgaaaatcgaccgcgagttcatcaacgccatgtgcgacagcgacaaggacggcaagatcgtgcgctcgatgatccacctcagcgacggtttggccatgccagccgtcgccgaggggatcgagaacatcggccagttggagtggctgcaccgcgcaggctgtcatttcggccagggctattacttcagccgtgcggtcgatgccgaggcggtgcagaccttgttggccgagtcggcaagcgacaggctcgggggcaaacgtccgggccatgccgctggctgacacggctgagcgcttgggccagccgatgcctggagcacgctgtagaagaggtgtcagaccggcgcgtcatgctcgcagttgaccatccaggagacaccgaagcggtcgacgaacatgccgaaacgctcggcccagaaggttttttccagcggcatcacgacctgtccaccttcggccagcccgttgaatacgcgctcaccctcggcaacgcttttcggatgcagggatatcgagcaacccttgatgccctcgtacgggccgccaccacaggccgcgtcgcccggcatggtgtcggacgccatcaactggtaatcgccgaggttcaggcagacgtgcatgatccgctcccgatgctcggcggggaaatgctcggaatcgggcgcctgggcgaacgtcatcatctccagcgtgccgcccagtaccttctggtagagcgtgaaggcgtcgcgggcctggccgtcgaaggtcagatagggggtgatcttcatatgttctctcctgttcgggttactggctgatccgtgcgcgcaaacgctcttcctgctcgcgcagctcgggggtgaattcggcgccgaagtcttcggcttcgaaaatctgccggatttcgatttcagaatcgccgatggcggatgccgggcaacgtttcacccagtcgatggtttcttgcagcgatccggtctggaacagccaatagccggcaatcagctcgcgggtttcggcgaacggaccgtcaaccaccgatgtctgcccgtcgctgaagcgcacccgtgcgccccggctgctcggatgcaagccttcgccgcccagcatgacaccggcattcaccagttcctcgttgtactggcccatggctgcgagcacctcctcgctgggcatcacgcccgcttcggtgtcctggttggccttgatcatcaccatgaatcgcatcgtgcggctcctctatcagttgcaagaacagcctagtcggtgctgctagatccgctggctctgttcattggtcgattcagggtcgaaggaatcgacacaggcatgcgatttttttagcgaatccagccgcagcagcgcgtagatgccagatggccaatcggcgcatcggcgggaccgaaccagccatcgggcgcgcggcgagggtgatccgaggcgggcgcggttcgcagcgccgcagctggatcagcgttgatcgctttgcatcaggtggtcagccagcgcctgaaaagccggcaacgacgtggggtcgttatcagcgtttttagccgaagggtgcgacgcgaatcgggcaatcaccatttgcgcggttggatcgatgtagagggtttgcccgtggacaccccgtgcagcgaacgcgccatggtcgttatgcaatacccaccacatggcacggtaactgccgccgggtagcgtgctgtaaccggccttggcgaatagctgcttgtccccgcccgcgcgaatggtccgtacggcttcggcgggaaacaatcgttcgccgttgtgcaggccttcatcgagcatcaattgcccgagcctggccatgtcccgcaagccggcgctcaaaccgccgcctgcgaatggcgtacccagtgcgtcgactgtgtagtaggcgtcctgctcggtacccatgcgctgccacaggcgttcggaaaccagctcgctgaccgccttgccggtcacgcgggcgatgatccagccaaggacgtcgctgttgaccgtcttgtagccaaacgcctcgccatgtgtgccagctttggcgaccgtctgcaggtaggcgtaatacccgatcgggccctggtagtcggccggtttcgggagcggattggccgcggcgctgtaggtccagatctgtgcttcggggttggcgtagtcctcgctgaaatcaagcgccgtcgtcatgtccatgacctgtcggacggtggcgtcaccaaaagcgctggaggcgagctcggggatgaccgctgctacttttgcctgatcatcgaggccgtcctctgcaaccagcacttcggcgagcaggccggtgagtgacttggtcatcgacatcgccgcatgtttgccacgctcgtcgaggcagccgaaatagcgttcgtaaacgactcggccctgatgcagcacaacgatgccgtcggtgtagttcgctgccagcgactgtccccaggtcatcgattcgctcgagccgagcggcgtgaacctcacggcatcgatgctgctgtcgagcgcttggcgcaacggcgccggcgcatccaggccccgactgacggcctcggtgggcagcagctcgcggatgtggcaaaccgaccagcgaagtttggggaaactgaagtagtccgagtccggctggccgatcagcttatctgccggaggcgggaagccctgcatccagtccagcttgattggatcggactgcgccgccgttagttgctgagcgtgggccggtgcgtacaggctggccaggcagatcgccgcgccgaaccgcctgaaccacacgccatggcggcgtagccgactttgcgaacaggtgactgcgcagggcagccggagtgatgcgctttcgcctgccatgccgtcacctctcgttatctatgtggtgcctttacccactaggcgatgggttccaatccgggttcgtcacccgcgtggcgggatgttcagccccttggccaccgccggccgcgcgacgaaggtgtccagtacccgctgcacattgacgaagcgctcgaattccaccagctcgcgtgcttcgtagaagcccaccaggttgcgcacccacgggaaggtggcgatgtcggcgatgctgtaacggccgcccataagccattcgcggccttccaggcgcttgtccagcacgcccagcaggcgttgggcttcggcgacgtaacggtcgcgcggacgcttgtcttcgtaatccttgccggcaaatttgttgaagaagcccacctggccgaacatcggcccgatgccacccatctggaacatcagccactggatcgtctcgtagcgagccgcggcgtcctcgggtatgagctggccggtcttgtccgccaggtacagcaggatcgcaccggactcgaacagcgccagcggctcgccgccggggccgtccgggtcgagaattgccggaatcttgttgttcgggttcagcgacagaaattcttcggagagctgatcgttggtttcgaagttgaccaggtgggcctcgtacggcaggccggtctcttccagcatgatcgataccttcaccccgttgggcgtgggcagcgagtacagttgcaggcgatccggatagctggcaggccatttctgggtgatagggaacttggaaaggtcgtgcatgggcttctccgcaaatgaatcggaccttgaggatagcgggtacttggcgaagcggtcatcgcttcggcgaggcgccatctcggtcgcccctcgccgaatgtgcgcgccggcgcgctattgtgcagtcgacaaggtcttgatcatcgccaccgtcaggtacaggcgcggtgcgatgctggccagctccaggtattcctcgtccgaatgcaggccagcgccgaccacgcccatggtttccagcaccgccggcgtctcgctgtccgggacgtaggcgtagccggcatcggtgccgaaacgcatggcaatgggctcgatatccttgccgatcttgccgtagagctcctgcgcttgcttggccagtgcttcggagccggcatttttcgccagcggcgggcgacccttgtcgatgtgcacctcgaccgtggttccgtcgatcagctgcttctcgacgatgcgtttggcatcggccagcacccggtcgtactcgctgagatccgagtagcgcatgtcggcctccgctttggcgctggaggggatgatgttgcgcttctcgccgccctcaatcatggtccagttgaccgtggtgcccttgctcggatcgcccagatcacgcagctgcaccagttggtgggccagctccatcacggcgttgcggccttcttccggcgccgaacctgcatgggaggacttgccctttacctcgagcatcaccgcgttgatgccgttggtggccgtggtcaccgcatccttgtccggcggctcgtaggagaagacgtagtcatgcttgcgcgccagctcggcgatgatcttcttcgagcccgaggagcccatttcctcgtccgggttgaacagcacggtaatgctgccgtagtcatcgaagccctcgcgcttgagcaattccagcgcgtgcagaatcatcgccacgccgcctttggcatccgcaacgcctgggccataggcgcgctgctcgtccatgcggaacgggcgcttggcggcggtgccttcgccgaacaccgtgtcgtagtggaccatcaacaggaagttcttgctgcccgagccctccagcgtgccgacgatgttgtcgcctgccgaaggcgtcgcgggcgtggtcgtgaccttcgcccccaaggcttcgaggcgcttgaccagcatctggctgacggtcgccaggcccttttccagcccggtgccggtatcgacggcgaccagttctttaaccgtttccaggtagggcttctgctcggcctcggcctgcttgagcagctcgtcgggtttgaggtcggcggcaaggctggtcagcgagaagaagcacagggcaacggcggccgcgagcggggtgggacgagcgcgcattggggagacctcgattcggatgggtgtgagattgagagcactccccgggctgcatcgttccggtgcgtatgctgcgaacgcgtgcgtcggcgcagttgggcgcccgcgctgcagcaacctgctgctggctctgcatggtcggctcccgctatggttgtgcttccccacagtcatggagcgctgcacgtgtcgctgaccacttcctacgatccgcaaaacatcttcgcccagatcattcgaggcgatgcgccttgctacaggctttatgaagatgacgacgtgctcgccttcctcgatctgtttccgcagtcctttggccatgccttggtgattccgaagcgctcggcggcgtgcaatatcctcgatgtggataacgaggcgctgtgcaaggtgatggccgtggtgcagaagctgacccgggtgatcgtcgacgagttgcagcccgacggcgtgcagatcgcgcaattcaacggcgcgccggcggggcagacggtgttccatattcacgtgcacatcgttccccgctatgccggcgaggggctgggcattcatgcggcgggcaaggctgagccggccgaacttgaaaagctgcaggcgcgtctggtggaggcgattgcccgctcgggcatctgagtcatcgcgcttgaccgccgggcgcgaccatcgcagcagagaagaggcaccaaagtactattcgtgggtgaccggcggcttcgtaccctgcgggcatgatgcctgcttcgtggttcctcacccggttcttcgcccgcgccttccgtgcggcgcggcgctgcctgcctgcggttttgatggccttggtcccgctgcttgcacacgcgcaaagcgaacaagcgctgccagtgctgacactaagcgtgttgcagttcggcacgccgcattgggagctcgatcacctcaagcgccacgggctggacaaggccaacggcttcgaactcaaggtgcggctggtcgccgatctgccggcgtcgcgtctggcgctcagcagtggcagcgtcgatggcgcggtgagcgacctgctctgggcgcagcaacgctacgaagccggcaccgcttatcgttacgtgccgttttcctcgcagatcggtgaagtgctggtcggtgccgacagcgatatccgtaccctggcggacctgcgcggcaagcgcatcggcgtggccggcggcccggatgggctcggctggctgttgttgcagaaagcggctgcggcgcagggagtcgagctggcacgcgaggcgaccgtccaatacgccgcgcctcccttgctcggccaggcgctacgccgcggccagttggacgcacttctgacgttctggcatttctcggcgcgcatgcgcggtgagggtggggtgcgcagtgcgtttcgcctggccgatctggcccgcacggtcgatctggaccccgatctgccgatcctcggctacctgtttgccgatgcctgggcgcgcgagcatccggacctgcttcagggcttcgcccgcgcgctacgccaggccaagcgccagctgaccgcggagcccgaccaatggcaggcgatccggccgctgatgcgctcagacagcgacgcggtattcgccgcgctgcgcgacagtttcgtcgaaggaattccccagcccctcgacaaggcccgcatcgatgcgctgcagcggctgctgatcctgagcggagccaagcggaccgccgtgatgcccgccgcgctgttccagagcgagccgtgaacggttcccgctggacctgttggctggcattacctgtccttgtgctggtatggggcgtcgcggcgctgctggtcgatacgccgctgctgccatcgccggcggccgtgctgcgcagcttctggctggccgtgcagagcggcgaattgccccatcatctgctggtcacgttgcgccgggtgttgatcagcttcgggcttgcgatggccctgggcgcaatgttgggcgtctggatgggccgttcacgggtggccaacgccgtgctcgatccgctactggtactgtttctcaacctgccggcgctggtcaccatcatcctgctctacgtctggttcggcctggtggaggctgccgccgtgttggccgtggtggtgaataaagtaccgaatgtggcggtaaccctgcgcgaaggcgcacgcagcctggatcccaaactcgaacagatggctcgggtgtatggcttcagccgccgccagagggtcgtggacgtctggctgccgcagctgtttccgtacctgatggcggcgacccgcggcggcctggcgctgatctggaagatcgtcctggtggtcgagctgctgggtcgctccgatggcgtcggctttcagctgcatatggcgtttcaggtgttcgacgtggcgagcatcctcgcctacagcttggcgttcatcgccgtggtgcagctgatagaactgctggtgctgcagccgctcgaaaggcgtgccacctgctggcgtagcgccgggtttcagcatgcttgagctgcgagtcgacggcgccgcggcggctcatccggtgctagggtcgattgaggtcaaggtggcggcgggcgaccgcatctgcctgctcggcccctcaggcgtcggcaagacgaccttgctcaacgccatcgcggggctggatccacgactggttccgagcgctggcgcgggttcacctcctcgagttggctacctgtttcaggaacaccgcctgctgccctggcgcacggtgcggcagaacctggccatggtcggagccggccctgtcgagatcgaccgactgctgagtgcggtcgggctgctcgaggcggctgatcggctgcccgatcaactgtctttgggcatggcccgccgcgcggcgctggcgcgtagcctggcgatccaaccggatctgctgttgctcgacgaacccttcgcttcgctcgacccggatcgtgccgccgagctgcgcgagctgatcgcccggctgctggacgagcagccgcggatggcgatgatctgcgtaacccacgatgcgcgcgatgccgatcagctggccaaccggctctggtacctctccggtcggccggcgacgctgcgctgggatcggccgctaaccgatggcgcttgtgcgagcctcatcagtgaagagctgcgcttgctcggcgtgtagcgggcgatcatcagggatacgacaggcatgagcggcccttttcgcggtcaagaccgctcccacagggtcctgcgtgccagagcaggcgttcatatcggccgtatcagaccagacgttcgaccaggatcgtgggagcggtctcgaccgcgaaagggcacgtctcagtggctggcgctgctgaccaggcctcgcccgcgacccagacttaccagagaaaacgcgggcgatcatcatgaatacggcaggcatgatcggccgttttcgcggtcaagaccgctgccacagggtccggcatgccagcgcaggcattcaggtcgtccatgccaggtcaggcgtttgaccagtatcgtgggagcggtcccgcgaatgggctcggctcagcggttggcgcattgctgaccaggcttcgccctctacagggaaaaatgcggcgaacttcaggcatacggcagacatgagcggcccgtttcgcggtcaagaccgctcccacagggccaggcaggccagagcgagcggccttttcgcggtcaggtcggccataccagaccaggcgtttgaccaggacagtgggagcggtctcgaccgcgaatgggcacgtctcagtggctggcgcactgctgaccaggcctcgccctcgacagggaaaaacgcggcgaacatcagggatacggtagccgtgagcgtcccttttcgcggtcaagaccgctcccacagggccgggcatgccagagcgagcggccctttcgcagccaagaccgctcccacagggtcaggcatgccggagcagggattcaggtcgtccgcgacgactcaggcgccggctcctcggccgtctctaaccgatggccaactgggtcagcgcgtgcaggaccagcccgaccagaccaccgaccagcgtgccgttgatacggatgtactgcaggtccttgccgacgctctgttccatctgctcgaccagttcgcggctttcccagttctccacgcgctgggcgatgtacttgccgatctgcccgcggtagcgctcgagcatcgcgggtgcggcagccatcaattgctcgttgatccaggtgcgcatcgcggtgtcggcggccagcgagtcgcccaggccctgggtcaggcgcacgatccgcttgccgatgcgcgaatccgggctgtccagatcggtctctagccattcggtcagctcacgccagagggtttgcaggtagtcggtggtggccggatgctccagcaactgggcgacgatgcgctcgacttccagccgatagccggggtcatgtttgagccgctcgatgtattcgctgacatgctcgtcgaagcgttcacgcagcgggtgctccggatcgttggcgacctcggcgatcacggcggaaaccccgtcgacgaatttgttcgccgaccagccgcccaccgctttgcccagccccaggtagcgcaaggtgcgcacctcggccgtgatggcatcggccaccagcgcccgggtatcgtcgtcctgcagcagggcgtcgagcttgatcagcccttcatcgagcatcgcctgatgcttgccctggcgggtaagcatttccagcacctgaccgcagaccggtgcgaggtcgaccttgcgtgcgcggttgatcagcttggcctgaacgaaggcctgcacccgctcgtcatgcagggactcgacgccgaaccgcgccatgcctgtgagctgccgcccgaccgcttcggcattggccggatgacgcaaccagttggccaggcgcccgccgatatccagcgcctcgagtttggccagcaccagcggcgtcgagaggaagtgggtagtgatgaaggtcgacaggttcttcccgatgcgcgccttgctgcgcgggatgatcgccgtatgcggaatcggcaaaccgagcgggtggcgaaacagcgcggtgacggcgaaccagtcggcaatcgcgccgaccatggcggcttcggcgaaagaggagaggtaaccccaggccggatgatgcggctccatcgcggtggccacgacgtagagcagggcggccagtagcagaagaagaccggccaccagtttcatgcgggtgaccggtgattgccagtggcgttgcagagggctcatgcgattcctcttgggcgtggcggatggaggcagtggcagtcatgaacgagacgggcctgcctgtacagcagacccgttgcaggcggtgcgggttcgaccgcggtgtggtacaggctcagtcctcggcgtcgtcttcttcgcgcagcagcacgtaagtgccgtcctcgaggcgctcacagacgtagaacatggcaatggtgccgtccggctcggtcacggcggcgtagtcgtccgcctcgacggaaaagtatcccttggagtcggccccggcttcgctggcgaacagggcagtgaagaaggcgtcttccggcatgccgtcgaagtagtcggcgcgctccttggcgtcccactcctgcggcgcttcgaacgggccggtaatgacgacgcgggcatcgcccatgtcgcgctcctcgccatccggatcggtttcatgggcgcggtagatggtgcattccagcgcatcggggtgagccaggatcgtctcgcgcgagggttgttcggtggcaggcatggggcaactccggtggcaggttggattggcggcagtgtggtggagtcctgttgcggctgcaatcgcaacgtgcaggcgttggcggtcgctcggtcgcgatcggaccgccggcaagcgaggcagcgaacgccgcagggccggagcggttccaattcgttgacaccttcctgaagtgagcccgccatgaccccgattccagaagacccgcccaagtacgacacacccgacgacgagcagccggacgtcaccatgaccgacagcggcgagaaggagccgggcgaggacccggacttcgacgacaccgaaatcgagggagacgatgaccgcacttgatccgagcgccccggcgcactgccggatggttgttctgccaatcgggcatcgacacgcggcacaccgccaatccgcgccactcacaggagcctcacatggataaatatcacgtcaatccgaccccttcgggctgggcgctgaccgaccagcaaaccggggagacggtgctgcgcaccctgaccaaggacgagatgtacaccgggctggacagtttcatggcgggcaagaccgcctcggtcgaggtctacggtcgccatggcaatctcgaagaggagcggccctatccgggcagcagccatccgatttcgactcgctagcgcgttccttcggcacggcaagcgaacctggcataccatcaccgcttcgctgaccgaccggagactcctatgcgccccatgctcgccctcatcccgttgctggccctggccggttgctcgtcctggcaggccgacccggcggacatcaaaccggtgcccgaggagcggttgcgtggctatcgggcacctgtggccaacggcggcgagctggtggtgacccgtgacttcggcctgcgcggcggtggttgctacgtagcggtcaaggtcgaccgccagctggcggcgcgtattcacgtcggcgaacaagtgcgcttgcaggtgccggccgggatgcacatcgtcagcatcgagtccgacccggaagacgacaccctgtgtggcaagggcagtctgctacgcgagaggactgcgcaggtcgagcagggcgccacgctgcagtttcgcatcagcgccgacaaccgcatcggcttcgacatccagcaggtggacgccgaataacggcgtcgcgcttggccatattgggggcggcggtatcgctacagcggccagacccagagaatcaccggcacggccaccagcaataccagaagcgacagcggcaggcccaggcgccagtagtcaccgaagcggtagccgcccggcgccatcaccagcgtgttcgactggtggccgatcggcgtcaggaatgcgcaggacgcaccgatggccacggccatcagcagcggatcggccgaagcctccataccgcgtgacaggctgattgccacgggcgctgcgagcaccgcagcggccgcattgttgaccacgttcgacagcagcatcacgccggccatgagaatcgccaccgtcgccgccggtggtgccgcctggccaatattcagcaatgcatcggcgatcaggcgcgagccaccggtagtttccagcgcttcaccgatcggcagcatggcggcgatcaggacgatgaccgacatgtcgatgctcttgtagatttcgccactggggaccaggccggccagcaccattaccagggctgcgcccaccagcgcgatggccgccggaaccatgcctagcgcgatgagcgccagcgcggtggcgaagatgccgctggccagccacacctggcgaggcgccgtgatccgtaggccgcgcgaggcgagaggcaagcagccgaggttgttcaatattggctgcaactgctcctcgcgggcctgcaacagcagaatgtcgccggcggcgtagcggatattgctcaatcgctgacgcagccgctggccctgacgggccacggccagcacgttcacgccatgccgttcgcgtagggccagaccggtcgcggtggtgcctaccagcgacgagccgggcgtgacgatggcctcgaccagcgctcgctcgccatgacggtcactgccggaatcgcctgccgtgtgcggcttgtccgaagcgccgcgcttggtcgcctgcttgtcctgctcggttttctgctgcgcttgcgccttgctgtcggcctcggcagccagcgtcagatgcgtcttgtcgagaaagctcttgagactgtcggagtcggcctcgaccagcagcacgtcatcgctatgcagcacttcgtaggtcgaaggcatcggctgatagtggccgcttcgcaccagggcgatgaccgccacctccgcgtcgtcacccccggcgacgatcaggtcatgcaaggtgcggccggcatatttgctgccgtccggcaccttcagttcggtcaggtaggcgctgatttcgaacagctcctgatcggaaccctggttttcccggcgtggtatcaggcgccagagaaggccgatgagcagcaggccggcgacggtgatcgccaggcctaccggaaggaaatcgaacatgcgaaatggcgtctcgccaacctcgcgccggtagccggcgatgatgatgttcggcggggtgccgatcagtgtcagggtgccgccgagcagcgagccgaaggccagcggcatcaacagatacgatggcgagcggccgctttggcgcgacatccagacggcgaccggcatgaacagcgcgagcgcaccgacgttgttcatgaaaccggaacacaacgcgacgatggccgagagcaacaacacctgggcccaggggcggtcgccgaccttggtcaggtggcgcgccagtgaatccaccacgccgctgttgagtaacccgcgactgactaccagtaccgccgccacggtgatcacggccggatgcccgaggcccatgaaggccttttccggaggcacgatgccggccagggtaacgaccagcagggcgccgacggcgacgacgtcgtagcgccatcgattccatacgaacaaacccagtgtcgcggccagcacggcgaatacgatcaattgatcgctttgcatgatcactccgatggacaggcgcgccgcgatcagccgggaggggccgtgagcggagcggtaggtggaagcaaaggttgtcgggcagggcaccgcagcgcggctacggtagcccgatgatggacctccgggccagtggcgggttcgctgccggcgtgcgcccgtggcggcgctgaaggcgcttgtggtgccgcgcggctccgtatcgctcgcggtgctggaaaaaaaacaaggcagcgggcatggtgacaagcgccctcaacgaaccggcaaccgtccatgccacagactattgttctgccatgccgcgatggctatccgcttgcggcgcagctctggctgcccgccggccaggcgcgcggctcggtgatcgtcagcagcgcgaccggtgtcctggcccgctactacgcgcggtatgccggtttccttcgtgagcacgggtatgcagtgctgacctacgactaccgtggcatcggcggctcgcggccggcgagtctgcgcggctttcgcatgcgttggcgggactggggtgactacgacttcgacgccgccgtgcgctggatgcgtgcgcgtgactcggacgggctgctggtgggggttgggcacagcatcggcggcttcctgcccggttttgccgcggcggctaccgaggtcgaccgctttctcagtgtcggcgcgcaatacgcctactggcgcgattacgccgccgagcagcgctggcggatgtttgccaaatggcatctgttcatgccggcggtgacagcgctatacgggtatttccctggccgccggctgggctggctggaagacctgccggccggtgtcgcgcgggaatgggcgtttcgccgcgcgcagctggaacacagctatcctcccgacgaccgtgagtggatcatgcagcggtttgccgccgtccgcgcgccgatactggccgtgagcatgaccgatgacgaatacggcacgctgccggccatcgagcgcggactgagctactaccgcaacagccgctgcgctcacgtgcgcctcagccccggtgagttggggctggagcgcgtcgggcacttcgatctgtttcacgagcgccatcgccaaggcttctggcaggcgactctggcgtggataggcgaaggccgcaatccatgggcgaccgcagccgctggttcgccggggcagactggctgaagcagcgctgaacccgatcgggtggctgccgcaaccgagcgctgctcttcacctgacattcgcagatccggtgcggctcgcctcgaaggcttgctgccgtgcgccggcgccgacgggttttgttagagcccgggattgtcgggtagcatcgaccgccttatctctccgaggagcatcatcgtgactacagcgcgcatcggtttgctacccgccgtgttgattgcggtttcggttgccttcgccggctggtcggtggggcagggcgtggagcgttttcgaatggccgatcgctcggtgacggtcaaagggctggcagagcgcgacgtgcaaagcgattttgccgtctggacactcggcttccgtcgcgccggcaatgatttcgccggtgttcagcagagcctgtcggaggatcgcacacgggtggtcgccttcctgcgcgagcagggcttcgacgctgacgagatcgaggtgcgcccgttgcaggtgcaagacctgctggcgcgtgaatgggcgccgcaggaaatcgccctgcgtttcaacggcagcggccaggtagtcgtgaagtcggcgcgagtcgaagcggtcggcaaggctgccaacggtgtcgatccgctgatccaggccggtatccagctcgataccgaacagaacggcttcagcgggccgcgctatcagctgcgtggcttcaatgacctcaaaccggccttgctggaagacgccacccgcaacgcccgtgagcaagcggcgaagttcgccgaagacgcgggcgcccgcctgggcgagctgaagactgccaatcagggcgtgattcgggtcctcgacgatgacggcagcgacatggacaccggccgcacgccgggcaagcgcctacgcgtggtcagcaccttcgagttcgctcttcagtaggcgccgcaggggcagcgatccgcctgaaaatcggggcgggtcgcgctgcgagaaaaatgcgttgaactcccttgaccctcacgttgcgtgaggcccgaccatctctcccgcacggaacaggagcgcatcgcgatgcagttgagagtaggtgaattggcccggcgttgtggtttgaccgtcaggacactgcaccactacgacgacatcggattgctgcgtccgtccgcgcgctccgacgctggctatcggctgtacgaccgcgacgatgtcgcacggctacagcagatccaggcgctgcgaagcctgggggtttcgttggctgacgtcggggcgattctcgaccggcctgaatcgtcggttgccaccgtgatcgagcagcagatgagcctgctcgaccagcagatcgcgcggcaggctcgcctgcgcgaccgcctggcgcatctgcaccggcagtgcgtcgcagggcagcagccggcgctggccgactggctggagacattggagttgatgggcatgtacgaacgttatttttcacaagatgagctgcgtcagttgccgttctacaaccgcaacgcagcaagcgatgcgcgttgggccgagttggccgaagagggcgcgcggctgctgcacgaggaagtcagcccgcatgacgaacgggcccaggcgctggcgctgcgctggatgcagcaactggagcaggacaccgcagccgaccccgcactgctggccaagctcgacgccatgcatctgggcgagcccgcgctgcaacagcagacgggcatcacccgcgaggtcagcgattatgtgttgcgcgccttcgccgagaccaagctggcggtgtaccagcgctacctcgacccggacgccatgcgcttcatgcgccggcattacctggagagcatgcgtcagtggccggggttgatcgctgagttacgtcaggcgcggcgcgatggcctggcggcggatgccgagccggtgcagcagctcgcccgccgctggctggcgctgtttcgcgcctatgccggcgacgacccgcagacgcagcagaatatccgcgaggccaaccagcgcgagcccagcctgatgcaaggcacctgggttgacgaagacctgctgcactatctcggccaggccgtcgccgcattgcaagactgatcgccgtcaggtacgggccttcgagccggctgcgacggctaaccgcgagcggcaggttcgctcgcggtggcggttgcgtggtatccgccgatcaatcgcaggccgtcgccacggggccgggggcctcggtctggtgacgtgctgtccaggcccaccagaacaccagcaggccaacggctcctgtcgctgcgccgatgtagccggtagaggtccagcccaggcctgcgctgatcgccaggcccccgagccaggggccgagcgcgttggcgacgttgaatgccgaatggttggaggcggccgccagcgtctgtgcatcggcggcgacatccatcaggtgcgtctgcaaggccggcgacagcgagaccatggtgccgacggcaaaggcggccggcaggatggtccacagcgagtgtgcggcgaatgggaataccagcagcacgcaaatgctccacagcagcaaccaggcgatggccttgaagcgcagtttgtcgaacagccagccgccaaacagattgccgacgatgccaccgaggccgaacgccgccagccccaccggaatccagccttcaccgacgccggtgacctccagtagcgtcggtgccaggtagctgaacacgcagaacatgccggcaaagccgatcgagctgatggccagtgccagccacaccggcttgcgattgaaatcgcgcagctcgcgcatggggttgttgcgtggctcgttgcgatcgagcggcaggaagatcgccaccagcaagaccgtcagcagtgcgatcaggccgaccagaccgaacgcccagcgccagctcagccactgccccagccaggtcgcgatgggattgccgatcagcatggcgatggtcagtccggccagcaccctgctgaccgccttggcgcgttggtccgccggaaccatcgaagcggccaccagcatggcgacgccgaagtacgcgccgtggggcaggccggcgatgaagcgaaacaccatcaacgagtgataatccggcgctaccgcgctggcgaaattgcctagggcgaaaaagctcatgagcaacagcagcaggtggcggcgaaacaggcgcgaaccgaggatcgccagcaacggggcgccaaccaccacgcccaacgcataggtgctgatgacgtggccgacctgcggctcgctgatgcccagcccctgagcgacgttgggcatcaggcccatgatggcgaactcgccggtgccgatggcgaagccgcccatggccagcgccagttcgatcaggaggatggcgcgggtcgacaacgtcggctggcctgtactggcgtgggtcatgaatgcctcgaatatctggaacgatgtgccgtgcgatcggcacggcgtgatgtcagggtggccggatatcagcctttgcgcgtgggtggcgccatgaactctggccccaccgggtcggtgatgtgctcggccagtagccggtcgatatcctgcaggtcctgcggcgaaagggtccagccgaacgcctcgtcgataccgtccagctggtccggtcggcgcgcgccccacagggcgatggtcggcccttgatcgagtacccagcggatcgccaaggccagcaccgacttgccatgacgctcccgcgccaggtttttcaacgcctcgaccgcggccaggtattgtgcgaaacggggcgccttgaacttcggatcggatttacgcaggtcgtcgccatcgaaggtggtgctgctgttcatccggccggagagcaggccacggcagagggcgccgtagccgagtacggcgaggccgttgtcacgcgcgtagggcagcacgtcggcttcgatagcgcgctcgaacaggttgtagggcggctgcacgctggctaacggtgcggccttgcggaacgcatccatctgatcggtggagtagttgctgacgccgatggcgaggatcttgccctcctggcgcagcttctccagctcggccgcggtctcctcgatgggcaccagcgggtccggccagtgcacctgatacaggtcgatacggtcggtgcgcaggcgccgcagcgagtcttcgatttcctgacggatacgggccggggtcgagttgcgccgcgggccgccgtcgctccagtccagggccaccttggtagcgatcacggcctggtcgcggacgccttcgagcgccttgccgaccacctcttcggaatgaccgaagccgtacaccggggcggtgtcgatcaggttgatgccccgttcgagggccgtgcggatggtggtcactgagcgctcgtcatccgcgccgccccacatccagccaccgatggcccaggtgccgaggccgatgcgtgagatgggtgtggcgatgccctcgatggaaagtgtttcgatggtcatgggtgctcctcgtctgtccggtgtcggccggccttgcagtaagccgggcaaagggtactgacagcatcggcgcgcaggcgtgcgaggcgggtgccggggcatcgggcacgggccgacgcgccatatgtgagcgatgcctggcggtccgcctcagtggcgtgccagcgcatcggcgatcaatcgcggcgtatcccgggcgcccatggtctgggcggcggccagcggcgtgacgccattgatgtcggtgcggcttgggtcggcgccgcgctcgagcaacagctctacgatgtcgctgcggtcgaacatggcggccatcatcagggcggtcttgccatcgggcgaggcgctttcgacgtcggcgccgtggtcgagcagcaggcgcgtcatcgccagattgcccttgaacgcggcgccggccagtgggctctgccccttgtcgttacacaactgcgggtcggcgccgttctccagaagcacgcgcgaggcatcgaggtggccgtgatagctggcgagcatcagcaggctgtcaccgttgtggttgcggatattggccggcagaccgcgccggagcagatccgccaggcgcgcggcgtctcccttgcgggtgctgtcgaatacctgctcggcgaacgccaacgcggcgtcgtccagttcgggtttggggctggatggggccgtcatctctggtcctcggctgttctgaattggcgaagcgccgtcattgtgccaaagcgaacgctgtgctccggcaactggctttctatccgaccgataggtaaccccaatgtgcgaaatggcaaaggccatccacgctatggcagtatctgcggcctgtccgctatcggtccgttgcgatgaagcccgaagatctcgagcgcctggtgactcaggcgatgccctacggcaaatacaagggccggttgatcgccgatcttccgggcaactacctgaactggttcgcccgggtcggtttcccgcccggagagatcggccagttgctggcgctgatgcaggaaatcgatcacaacggcctgtcacccttgctcgacccgttgcgccgccgctgactcaagcctggctttcggcctgccgcgtcgccagcgcaggggcggcatagatgccgacgtccactgccagggccatgacccgctccaggtcgcaggtatagacgagcacggcctgcagctcgtcatcgagcggctcgctgaagtccaccagcacgtagccgcccttttccgggtagaggctgctgagctgggtctggatgcggttgagcgctttcagcggttcggttttcgccagttgcttggatttgaggacgaaattcacgtccgggccgaacgagccaacgatctgctcgaacagtgtctggtagtcgtcggcctggaacagcacggtgtccggcaggctgccgacgatcatccattcgccgagggggatggggaaatcgtcgtcatagatgatgtccggattggcctgcaagaatccttgcgggtccgcgtaggcctgcgccgcttcgtctgccagccggttgatttcgtcgtcgctcatgcagcccgagctgatcaggcggatcagttcggcgagtgggtctttcatcgggcggtcctggcgtgttgggcctgcaaggataaccgaaagccgcccggcgctgcggagcggggatggcactctcggcacacaacgattctgccggctcaccgcgaaggctgcccggtgagcgttttgtccacctttcaatgcgcagctgcggtttctctccggttttcgtgcacaatagccgccatataaaccaacgcggcatgaacgagggcgaacggcgtgatcccgcctcgctttgttccggcgcagagaatgatcagccaatattcaagaggaacgaccgtgcataacgtcgtcatcagcggtaccggcctgtatacacctgccaacagcatttccaacgacgagttggtcgagtcattcaatacctatgcccgtcgtttcaatgacgagcatgccgcggccatcgaggcgggtgacgttcagccggtgccggaatcgagctccgccttcatcgagaaggcgtcgggtatcaagagccgtttcgtcaccgacaaagccggcatcctcgacccggatcgcatggttccgcggattcccgagcgcagcaatgacgattggtcgatcctttgcgaaatgtcggtcaaggcggccgagcaagccctcgagcgtgccggcaagacggccgccgacatcgacggcgtcattgtcgcctgctccaacctgcagcgcgcctacccggcgatcgccatcgaagtgcaggccgcgctgggcatcaagggcttcggcttcgacatgaacgtcgcctgctcctcggccaccttcggcatccagaatgccgccaacgcggtgcaactgggacaggcacgtgcgctgctgatggtcaatccggagatctgcaccggccacatgaacttccgtgaccgcgacagccatttcatcttcggtgacgcgtgcaccgccgtggtgatcgagcgcgccgacctggcgacctcgccgtaccagtgggacgtgctcagcaccaagctggcgaccgagttctccaacaacatccgcaacaacttcggcttcctcaaccgcaccgccgaggaatacatgaccaacccggacaagctgttcgttcaggaagggcgcaaggtattcaaggaagtctgtccgatggtggccgagctgatcggtgcgcatctgcaggaaaacggcatcgcggtggaacaggtcaagcgcttctggctgcaccaggccaacctcaacatgaaccatttgatcgtgcgcaagctgctcggccgcgatgcgaccccggaagaagcgccggtcattctcgacacctacgccaacaccagctcggccggttcggtcatcgcattccacaagcatcaggatgacctgccggccgacagcctgggtgtgctcagctcgttcggcgccggctactcgatcggcagcgtgattctgcgcaagcgctgatcgccgtgctcccggcgcgccttcttccgccggatcgttccaaacaaaaaagccccggcatagccggggcaaatttttggagcaatacgagggaagggacgatcagaagctgtagaccatgcccagcgagaagacattgatgtcgtccccggccgcagcgacctggtagacgtcggtgtcgtggccacccttgatgcggtaggacgccgtgttgtcgtcgttcttcagaatgttgtacacgccatagacggtcagctgcttggacagcttgtggtccaggccgagactcagctgggtggcgccggaatcgtccgcgtcgctccagtcgtcagcggctacgtattgcagcttcagcgtgttggcgccgaacttgtacgccgtgttgaggccccaggaatcacgctcgccgagccccggctcttcggtttcgaaacggtcgaacatcgcacccacgctgaccgggccgaaggcgtagctggcggccacgcggtaggcatcgctctcgtaggcttgaacgtcgtcagccagggtctcttcgtcatcaccgtcggccttctcatagccggcgctgaatgacagatcaccgacgctgtagcccagcgcaatgctggcgagggagtaatcgttgttctcgatgtcgccgtcttcggtctcgaaatcttcgaacgacgtggcgtacatggcgctggctaccaggccacccatgctcgggctgacatactggatgctgttcttggcgcgacggttggcttcgtcggcaatgttacgggcgtcgccgacggtgtcgccgaacaggtcgaaggcgttgcgcacattcttgacgggtgtgtcctgattgcccacaagcacctggccgaaatcgcctgccagaccgacaaaggtgttgcggccagcaaaattgtcaccaccttcgtcgatgatgatcttcgattcgatctggtagacggcgttgaggttcgggttgatctcggtaacgcccttgaagcccagacgcgacgagttgctggcgatggccaattcgctgtcggtgtcgttgtccacgaagtccgccgacacgtgggccttgccataaatctccagttgcttgccgatgatctcgtaggcgttggcggtagtcggcagcgcgactgcagcagcaatggcgagggtcagggggagaaacttgcgtggcatgatatttcctttctgtgcgttcgcggattggtagctacgccgcctccgggtcctaaccccccaagcggctgtgggcagaatggaggggagcggttacagcttttcgaaagtttggcgacatttctatgacagagagtgccctgataactttcattaactattaacctgggcgttacggtttcaaagctcaccaccactcgggacttcagttctcgtgatcaagcggcgacactatgcgcatgcctatccagacgcttccccgcctcgccgaactcgaaactgcccgctgggataccttgctcggccccgagccgcagccgttcctgcgccatgccttcctcagcgcgctggaggacagcggcagcgtgggcgggcgtagcggctggcgggcccaacatgcgttgctgagcgatgacgaggggcgtgcgatcgcagcgctgccgctgtaccgcaagacgcactcgagcggcgaatacgtgttcgattgggcctgggccgacgcctgccatcgcgctggcatcgagtactacccgaagctgctctgtgcggtgccgttctcgccagtgaccggtgcccgcctgctcggtgatcgggaggccgcggggcgactgatcgacgcgctcagcgcgggccttgccgatcagggccagtcgagcctgcacatcaacttcaccgagccggatgctgacgcagtgttgcgcgggcgtgacggttggctggagcgcatcggttgccagttccactggcacaaccgcggctaccgcgacttccaggattttctggacaggctcacttcacgcaagcgcaagcagctgcgcaaggagcgcgagcaggtggccgggcaggggatcgatttcgagcggcgcgaaggccaccagctcagcgaggcggagtgggatttcgtctatgcctgctatgccaatacctactacgtgcgcggacaggcgccgtacctgacgcgctccttcttcagcctgctcgccgagcgcatgccggaggcgatccgcgtggtgcttgcccggcagggcggccggtcagtggccatggcgttctgtctggtcgacggtaatggactgtacggtcgctactggggcagcctggcggaattcgaccggctgcatttcgagacctgtttctatcagggcatcgactacgccatcgcggcgaacttgtcgcgcttcgatgccggggcgcagggcgagcacaagctgatccgcggcttcgagccggtgatcacgcggtcctggcattacctcctgcacccaggtctgcgcgccgcggtggcggagttcctcgatcaggagcgggtcggcgtgttgcgctatgccgaagcggcgcgcgacgccttgccgtatcgccaggtcgaaggttagcgcgccttgggcgcggcgctgacgccttcgagggtggcgaacgaggtgtccttggcggtcagcaggaagtcgcgcatgaagggcgaatcgagcatatcggcgcggataccggcatacagcgtggcgaacaggcctttctcacccaggcgcttggcggtgacgtagccgcgtgtgctgtattcgtgcagcgcccagttgggcacgctgcatacgccgcgccctgaagccaccagctgcatcatcatcacggtcagttccgaggtgcgaacctgcgccggctcgacgtcggccggctcaagaaatcgcgtgaaaatatccagtcgatcgcgttccaccggataggtgatcaaggtttcggtcgccaggtcttccgcgcgcacgtaagggcgggtcgccaggggatgttgattggcaacggccagcaatgcttcgtaggtgaacagtgggacgtaggtgatgcccggcaggtcgatcggatcggaggtcaccaccaaatcgaggtcgccccgtgccagcgccggcagcggggcgaaggagaaccccgaggccaggtcgagctcgacttctggccaggcgtcgcgaaactgatcgatggtcggcatcagccactggaaacagctgtggcattcgatggccatgtgcagccgtccggctgtgccgccggcgagcctggccagatcgcgctcggcactgcgcagttgcggtagcaggctgtcggccagttgtagcaggcgcaaaccggcgctggtgaagcgcaccgggcgcgtcttgcgcacgaagagctggaggcccaagcgctcttccagctccttgaactggtgcgacagggcggattgggtcagatgcaggcgctcggcggcttcgacgaggctgtccgtttcgcgcaatgcatgaagcgttttcaggtgacggatttcaaacatgctacggcttcctgctgatttcgcggtcgagccttgaatcgcgaagaattcggcccgcaaatgcccgagtgacttgagcaccgttcatctgccgccaagtgtgttccagcgaggtagcgattgtcgagcgagccgagcgggagtcgaggcgagtgcctgacaaggcgggcggatggccgtccggtcagacggtgccgttcgcttggaatccgagtgttacagccagatacggcccaccagatacgccagcgcgccgataaacagtagcgcgacgatgatcagcgcgccgtcgcgcgccatcatgcccaggccgaggacgctcagggcggcgccagcaatggagttaccgaagggaatcagttccagcggcggcatgctggcagcgatgagcaggcacagcagggcattgatgtataccgcaacaccttcggtgagaaaggtcaggcgatgccgcagtattcgatcgacgaaccgcgccggtcgctggagaaaagtgatcgcgcggtcatatttcttgcgactggcgcagcgccggagcaaccagccaggcaaccagaaatgccggcgtccgagtagcaactgcaacgcgatcaggcccaccatcagggcgaaaaaggtcggcagcccagggatgcccgacagtggcgagaacactagcagtccgggcaccagcagcagtgcaccgaagctgcgttggccggtcgcttcgagcatgtcctggatggtgacgggcgcgtcgggctggccggcctgcttcaggtgctcgagcagggttcgcaggttctgcggcgggtcttggacagtcatcggcttttctccaacggtccgctgttagaaaaccgtggcgtgaaaatatccaccatgaatagttttaatgtttaaagaaaattacatgaggttgtttcaataatggcccgcacggacaatctcgctcatcgaaaagcgagacgaattggagatcgtgatggctgttgctcattccctggggttcccacgcattggtgccgaccgagaactgaagaaatcactggaggcgtactggaagggcgatctggcagaagacgcactgcggcgagttggtaccgagctgcgcgcggcccattggcagctgcaagctgatgctggcattgaattgctgccagtcggcgacttcgcctggtacgaccaggtgctgacgcattcgctgatgttcggcgtggtgcctgagcggtttcgcccggccgacggcgtgccgaccctcgataccttgttcgccatggcgcgcggcgtcacccagcattgctgcggcggtacgcaagcgcaggaaatgaccaagtggttcgataccaactaccactacctggtgccggaattcgctgccaaccagcagttcaagctgtcctggacccagctgttcgaggagatcgaggaggccaaggcactagggcacgccgttaaaccggtgctgatcggcccgctgacctatctttggctgggcaaggcccgtggggaggcgttcgacaagctggagctgctcgaacgactgctgcccgtatatggcgaggtgctcgagcgtctggcggcgcagggcgtcgaatgggtacagatcgatgaaccgatcctgaccctcgacctgccacaggactggaagaacgccttcgagcgcgcctacaacctgttgcagcgcgcgccgctgaaaaagctggtcgcgacctatttcggcggcctcgaagacaatctgggcctggctgccgcgctcccggtggacggcctgcatatcgacctggtgcgtgcgccggagcaatacccggtgatcctcgaccgcttgccggcctacaaggtcctttcgctcgggctggtcaacgggcgcaacgtctggcgttgcgatctggacaaggcgctggaggtcctgcggcatgctgacgagcggctcggcgagcgcctttgggtcgcgccgtcctgttccctgttgcataccccggtggatctggcgcgcgaggaccagctggacaccgagctaaagagctggctcgcctttgccgtgcagaagtgcgccgaggtttcgatcctggcgcgggcgctgagtatgccggacgacgatcaggtgcagacggcactgcagcatagtcgcagggtgcaggccagccgcagcgcatcgccgcgtatccacaagccgcaagtgcaggcgcggctggctgcgatcgaaccgcgccatctccagcgccagtcaccgttcagtgagcggatcgagaagcagcgtgcgcacctggcgttgcccgccttcccgacgaccacaattggctcgttcccccagacgccggccatccgccgtgcgcgccaggccttccggcagggcaagctggcggcgaccgactacaccgcggcgatgcaagccgaaattcgccacgcggtggcgatacaggaacaactggggctggatgtactggtacatggcgaggctgagcgcaacgacatggtcgagtacttcgccgagcaattggacgggtacgccttcacccgttttggttgggtgcagagctacggctcgcgctgcgtcaagccagcagtcatctacggcgatctcagtcgtccggcaccgatgacggtggagtggattcgctacgctcagcagcagaccgggaagatcgtgaagggcatgctgaccgggccggtgaccatgctgatgtggtccttcacccgcgaagacatcagccgcgaacagcaggcgcagcagctggcgctggcaattcgcgacgaggtctgcgatctcgaggcggccggcactcgtatcattcagatcgacgaagcggcgttccgggaaggcttgccgttgcgccggtcgcaatggcatcagtacctggattgggcggtcgcggcgttccgcctgtgtgccagcggcgtacgcgacgaaacgcagatccatacgcatatgtgctacagcgagttcaacgacgtgatcgaggcgatcgccgccatggatgccgatgtcatcaccatcgagacctcgcggtcgcagatggagttgctcgaggccttccgcgccttcgattaccccaacgacatcgggcccggcgtctacgacatccattcgccgcgggtgcccgataccagtgagatggttcaattgctggagcaagcctgcgagcgcatcccggccgagcggctatgggtcaatcccgattgcggtctgaaaacccgcggctggccggaaaccgaagcggcgctgatcaacatggtcgctgccgcccggcagcttcgcagcgcccggcgagacctggtggcctaagcgattgccgagggcctcgtaccggcaggccaggccaagacaggcggcctgcaccggtgcgggccgcgccgtttttggctaatgtagcgggcctcattccatgaatcctcatgagccatgacacctgccatcgatctgctgaagaaggccaaggccgagcaccgtatccacagctatgagcatgacccgaagtccgcctcctacgggctcgaggccgccgagaaactggggctcgagccggcccgcgtattcaagacgctgttggcctgcagcgagaagaacgagctgctggtcgcggtggtgccggtcaccggcagtctcgatctcaaggcgctggcgcacgcggcgaacgtaaagaaggcggatatggcagaccctgccgcggcgcagcgggcgactggctatctggtcggggggatcagtccgttgggacagaagaaacggctgcgcaccttcatcgacagttcagcgcaggccttgccgagcatcttcgtcagtgccggacggcgagggctggaagtcgagctggcgcctgaagtgctcgctgagcacaccgccggcagcttcgcgtcgatcggccgaggctgagcgcctgacgcgacgacatgatcagagcggcggcagtatctcgccgagatcggtggcattgatgccaggggtgtggaattcgttgttcaccagctgctggccttccatctgcggctgggtcacccaggtcaggatgtcgtaatagcggcggatgttggccacgaaatggacgggctcgccaccgcgtgcgtagccgtagcgggtctgggtataccactgtttctgcgacaggcgcggcagcatctgtttgacgtcgagccacttgttcgggtccagcccttcgcgctcggccagcttgcgcgcatcttcaagatgaccaccgccgatgttgtaggcggccagggcaaaccaggtacggtcgggctcctggatgctttcgggaaggctgtcccgcacctggacgatgtattttccgccgccctggatgctttgagccggatcgagacgattggacacgcccatggccttggcagtgttgagcgtcagcatcatcaggccacgcacgccggtcttcgaggtggcctcgggttgccagtgggattcctgataaccgatcgcggccagcagacgccagtcgacgccgtgcgtcttggccgtttcacgaaagatcttttcgtaacgcggcaagcgctgctgcaggtgtttggcgaaggcgtaggcgccgacgtagccgagcacgtcgacatggccgtagtagcgttcgcgcaggcgctgcagggtgccgttctcccgagccatgtcgaggaactggttggcggcttcgatgacgctgtcgtcttcgcccttgccgaagatccacgccaggctgttctgcccgcccagatcgaatgcggcccgcgcgttggcgaagtacacctgattgagcgccagttcgttggactcgaccagcgttaggtcgatctggccctcgtcgaccattcgcagcaggtcgaccacctcgaccgcgtcggattcctcgtagcgcaaatcaggcagctcggcctgcagcgcctggagctgttctgcctggttgctgcccttgagtaccataatgcgcttgccgaccagatcctcgggctgggtcgggcggcgctggccgcggcgatagaccacctgagtggttacatccaggtagggcttggtaaaacgcgccaggtccttgcggctttcgctggcgaccaggccggccgccgccagggtcgggccgcctgggcggttgagccgggcgaatatgtcttcgatgctgtctgcggtctcgatctgcagtttgacgccgaggtgactggcgaaacgcttgaccagctcgtattcgaaaccggcttcgccgttgcggtcctggaaataggtggacggactgttacgggtgatcacgcgcagtacaccttcctccttgatacgctcgagcgcgctgggcggttcagcgcagctgccgagcatcaggaagagtccggtcgccagcaaccaggaggtgcagcgctttcggaacgcggattgggcaaacatcggcgcagtatacgcaaaggcgaaccgccaccatatctcgacaggatcgacggactttgctaagcgaaacggcggggccgctgctcggcgttgcgaatcgccccgcgcccgcgtagatgaccgctctgtttggccgctgtcggcgactcacgcgtcgtaccggccgccaggcttgccgagcatcgacgagcgcgggaaaatcccggccccgttacgggccgtcaggcgccccgtgtggccattcatcccaccgagagagtccgtcgcatgagcgtcgcttgcgtgaagccgtggttcgtttatctggtgcgtgccgccaacggcgcgctgtactgcgggataagcgacgatgcgcaacgtcgtttcgccgcgcaccagagcgggcggggcgcacgcttctttcattcgagcccggcggtcgcgctggtctatgtcgaaacctgtggcagcaaaggtgaggccttgcgccgcgaacgggcgatcaagcagatgaacaagcccgccaaagaggccctggtgtcggctcagcgcagagattcggtgaatggtcaggcaatcagctgaacgggtaggccgctttctccgtcgcgagtaagcttccgatctccccacaagactgacggagcccgcaatgcacgaaatcattctgcaccactatcccacctcgccattcgccgaaaaagcgcggctgatgctgggcttcaagcagttgtcctggcgctcggtggccattccgcccgtcatgccgaaaccggacctcaccgcgctgaccggcggctatcggcgcaccccggttttgcagatcggcgcggacgtatattgcgacaccgcgctgatggcccgtcggctggaggctgagaaaagcacgccggcgttgttcccggaagggcaggagttcgtcgccgcgacgctggcccaatgggccgactcggtgctgttcctgcacgcggtcagcttggtattccagcccgagtccatggccgtgcgcttcgctcaggtgcccaaagaattcatccaggtattcagcaaggaccgcaccgagctgttcagcagcggctcggtgacacgcattccgctggagcaggccaagaaccactggccggtattgatggcgcgtctgcagcaacaactggcgcgcggaaacggcgaattcctgctggggagcgcaccttgcatcgctgacttcgccgtagcgcattgcctgtggtttctcaagggcacgccggtcaccgcaccgttggtcgacgattacccagaagtggcggcatggctgggcaaggtcctcggcgtcgggcatggctcgcatagcgaactgtccgcagaagacgccctgacgtgctcccgtgaggcgacgccggccccgttgccggacgaagccttcttcgagcccaacggtttccaggccggccagtcggtcaccgtctgcgcggtggattacggaacggatccggtggctggcgagctggtgttcgccggtgtcgaagagttgatcctgcgccgtgaggacgagcgtgccggagtggtgcacgtgcacttcccgcgaatcggctatcgcatcgaggcgaactgatacccggatccgcggcgtggtggcacgccgcggactcaggtctgtctgtttacagcgcgatgaacagcagcgtcacgcccagcagcagtcggtagatcacgaaaggcagcatgcccagcgcatccagcgctttgaggaacagcttgatgcagaggaaggccgcgacgaaggacagcgccgcgccgatgaaaatgtcattccactgcgccgcctctcccgattgcaccagttcgacggctttcaacccacccgccgcgagaatcagcggtatcgacagcaggaaggagaagcgcgcggcggtctgccgggtaaaacccagcagcagcgcggcggtcatggtgatgcccgagcgcgacgtgccgggaatcagcgccagcgcctgggcgaagccgatgatcagtgcgcttttccaggtcagttgatccatttcggcaacccgccgtcccttgacgtccgcataccagagcagcaggccgaagatgatggtggtggcggcgatgaacagcatcgagcgggtgtattgctcgatgtagtcctcgagcagcagcccgaggatcgcggccggtagcgtgccgatgatgatcgcccagcccagacggctttcggcgctggcctgccgggtgaatacatgcgccagccaaccccgtgcggtggcgataacttcatgacggaagcagatcagcacggccagcagcgtaccgacatgcaccgcgacatcgaacgcctgcccctgatcgggccaacccagcacctgggaaggcaggatcagatgagcggaagaggaaatcgggagaaactcggtgatgccctgaaccagggacagaataatcaggtgcagccaatccattgtgaatccttaaccagaacgggtcttgcgcgggcgcggcggtgatagagcagccatgagactcgccaaccggcatttcatttcatcggcgacgggcaaatttcgttctgcctggtgtgcccgcattggaggacgccatgcgccgccacgacatgaatagcgtctcggcgaagcgccccttgcgccatatgccccgaggttgccgtaggagcgcgcctgccgcggttcagtccttgcggcgcttgagctggtcggtcaactgggtcggcaactggcggatgatcagcatgttgcgcgcttcgtcgtattcgatcttcgagcccagcaggtgggattcgaagctgatcgacaggccctcggcgcgcccggtgaagcgctgaaactggttgagggtgcgcttgtcggccggaatctccggagaaaggccatagtccttgttgcgaatatggtcgtagaaggcgcgcggatgctcctcgtcgatgaccccggacagctcctccagcgacatcggctcgccgatcttggcctggctgctggcgtaaccgaccagggcgctggttttctcgcgtgccttctcttctggcaggtcttcgctttcgacgtaatcgctgaacgccttgagcagcgtgcgcgtctcgccggggccgtcgacgccttcctggcagccgatgaaatcgcggaaatactccgagaccttcttgccgttcttgcccttgatgaaggaaatgtactgcttggattgccggttgttcttccactcggacaggttgattcgcgtggcgaggtgcagttgcccgagatcgaggtgcttggcctcggccacatccagcgaatcggtgaccgtcacaccattgctgtggtgcagcaaggcgatggccagatagtcggtcatgccctgctggtagtgcgcgaacagcacgtgcccgccggtggaaaggttggactcttccatcagcttctgcaggtgctccaccgcctgtcggctgaacgcggtgaaatcctgattgccctccatgtactggctcagccagccactgaacggataggcccccgactcctcgtgaaagtagccccaggccttgccctgcttggcgttgtagctctcgttgagatcggccagcagattctcgatggcctgggattcgcccagctccgaatcgcgggcgtggagcactgccggcgtgccgtccggctttttttcgatcaggtgaacaatgcagtggcggatgggcatgggttactcgcatcgggtgaggcagacgggcggcagtttacccgagccgtcatgtccgtcgcagagcaaaaaaaagtggatgcgggtgagtggggggatgcgagtaagatggatcccccctcaattttgctaagtgtgtcggcgatgaatgcgatatggcgcaacagtgtctggattctgttgggtggctctctgatcctggccgtttccctgggtacgcgacatggcttcggcctcttcctgccgccgatgagcgcggagttcggctgggggcgtgaggtgttcgcgttcgccatcgcgctacagaacctgatctgggggctggcgcagccggtcaccggtgcactggccgatcgcttcggcgtcgcgcgaacggtgctgatcggcggtgtgctctatgccgtgggcctgctgctcatggccggtgcggattcgccgctgtcgctctcgctgagcgccggtctgctgatcggcttggggctttccggtacctcgttctcggtgatcctcggtgccgtagggcgtgccgtaccggcggaaaagcgcagcatggcgatgggtatagccagcgccgcgggctcgttcgggcagttcgccatgttgcccggcacgctcggtctgatcggttggctgggctggtcgtcagccctgctggcgctggggcttctggtcgcgctgatcatgccgctggcgctgatgctgcgcagcggcccagcggctccggtaaccgggccgcagcagtcgctggtcgaggcgctgcgtgaggctgccggtcatccaggtttccgtttgttggcccttggtttcttcgtctgcggctttcaagtggtgttcatcggtatccatctgccggcttatctggtcgatcagggcttgccggcaatggcgggcaccacggtgttggcgctggtcgggctgttcaatatcgtcggcacctataccgctgggtggctgggcggttgttactcgaaacccaagttactgacggccctgtacctgtttcgggcggtggtcatcagtgcgttcttcttcgcgccgctgacgctgtggacggcttacgccttcggcattgccatgggtctgctgtggttgtcgacggtgccgctgaccaatggcacggtggcgacactgttcggcgtgcgcaacctgtcgatgctcggaggcatcgtctttctgttccatcagatcggctcgttcttcggtggctggctgggcggctgggtgtacgaccacaccggtagctacgacctggtctggcagatctccatcgccctcagcctgatggcggccgccttgaactggccgattcgcgagcagccggtcgagcgcgtgcgcctggcggcaggcacggcatgatgcacaacgggtggcgctacgccggcgcggcgctattgctcgcgctgctgctggccgctgcctggtggggatggcagtggggcgggctggccctgctgcaacttggcgtggggatgtgctgaaacgctgtttcgctgtttatccccgcatgcggggaatcaattcgtcaccgatggctccaacaagcgagacgcatgcggtttgtcgcagaaccgtaaccaaagccctgtaaaaagctgcggcatgcagttatctggagccaaccaacatgtccactcttaccgaactagcccaacagattgcccagttgtaccccttgcaggacaaacgtgtcggcaagcgctaccgcgtcgtgggtgagctggcgggtatgaccgagttggaagagatcaatggtgaaccgcgctacatccagaccatggcgctgaagaacaagcaactctgggatctggcggtctgatgcatgtcccgggtgcgcgaagcacgcctggacgacgccgtgccgctggtgcggctgctgggtgagcttggctacccgggaagtgacgcgttcatcgaccgccggctacggcagcaactaggtcacgccgatgcctgcctgctggtggccgaaggggaggatggccagctgctcggcttcatctccttgcacttaatcgtccagctggccctcgatcgcgatttctgccggataagttacctctgtgtcgacgccaccgcgcgtggtcaggggatcggcgagcggctggtgcgggccgccgagcaatatgctcgcgcacgtggctgtgatcgcctggagttgcactgcgatgaacgtcgcacggcagcccaccgcttctatacgcggctgggctaccaggaagctcccaaatactttcgccgctcgcttgactgactcaacccggctggggtttccagcgtgcggcgcgccacgcgctgcgctgctcgtcggtcagataggtccaggcgacgaagcggctgcgcttctgcccttgcgacatgtccgacacctgcacctgtcgagcgccgagtttcttcaggcgcgcctgcaggggctggacgttgcccgccttggacaccagggtggtgaaccagcagacctgctggcccacgtcgcggctttcgtcggcgaggcgggcaatgaaagccgcttcaccgccttcacaccagagctccgcggcttggccaccgaaattcaaggtcggtagcttgcgcttcggatcgagcttgccgagattgcgccacttgcgctggctgccgctgctggcctcggcctgggaagcatggaagggcgggttgcataaggtcacgtcgaaacgttcgtctggctgcaccagaccagcgaagacatgtcgtggatcggactgctgacgcaaggtgatgcttttgccgagcgtgttggccgcgacgatggtgcgtgccgacgccagtgcaatcgcgtcgatatccgagcccgtgaagcgccagccatattcccgcaggccgatcagcggatagatgcagttggccccggtaccgatatccagcgcccggatgtgcccgccacgggggatttcgcctgcgttgtcgagcgccagcagatcggcgaggccgtgcacgtagtcggcgcggcccgggatcggcgggcacaggtagccgggcgggatgtcccagtgggcaatgccatagaactgcctgagcagcgcacggttgaacacccgtacggcgtctgggttggcgaagtcgatgctctgcttgccgtaagggttgatgatgacgaacgctgccagctccgggctgccggctataagcgccgggaagtcgtagcgcccggtatgacggttgcgcggatgcagggtggacttgccggcgcccggtttgtcggggcgcggcggcgctttgaaggttttcggagcggacatgtcgactgtctgtagcgatcaaggccggtattgtcccacagctttcagcgcgggcgtggcaccaacagcatccatatcagcccccagagcagcgcgccggcgcccagccaaaaggcgctatgcagggttccgcccatgttcagccagatgcccgtcagccacggccctgccagttgggtcaggctgtagagcgcaaccaacgcggccgacaggcgtggaccctggtggggatgtaatgttcgcgcaagccgctgggtgagcagtaccgtgccgaggaaggtgctgccgaccaggacggcgcacagcaggatgccaggcgcgcccggtagcaacagcgccgccagcacgccgatgagctgcgtgacgtagctgaagcgtagcgccagggtatcgccgatcagggcaccgagccgattccagagccatggagagggaagggtggcaagtgccaccaccagccagctgctttggatcagcggactgcctggctccacctgcaggcgcaccaccatcggcaggaatgtcatgggcaggatgtagcccatgccggcgccggcgtaggagagaaacagcggcgtgctggcgcgatccagcagccgtccgctgtgcgcggaggcgtcgcctgcgctggccgggtcgtcgggtatgtccaggtgtgccagctgccgccagccccaccaggccagcggaatcgacagcagcgcagcgggccaccagcgctcggcgccttgcagcataccgttgctttgactggccaacaggctggagaggatcagtccgacacaggcgccgagatacaccagcccactggacgacacccgcctgtgacgggcgagccattcgagaatcagcgaaggtgcctggacgaacaccagcccattgctgatgccgttgagcagacgcagcatggccagcgagtccgccgactccgcctgggtttgccccagcgtcgtcagtacatgcagcaccagcgcccagggcaggctgcggcggatctgagccacgcgatgccagcgcaacgccagcagcgctccgatcaggtagccgaggtaattccagctggcgatgctggcgccctgctgcacggtgagcacaccgtcttccaccagccagggcagcaacggtgtgtagatgaagcggccgagtccatggacgacgagcaacagggtggcgccggccagcagtaccggaaacagggcggggcgtgagggcatcgaaggcgaaccatgcaggcagggtggccttacagcttagcgacacgtgcgacgaacgaccacgctactgatggccaaggcggtgtcggcgcgcgagctggaacgacgtcgatcggacctaagccgctcagggataggccagcaccgccttgatctgcgccaggttgcgctcgatccactgccggtcgatcgcgccccagtcgtcaattcggtagtggccgccattatgtcgctcgccggcctcctgcacgaaacggcagtcgatatccaggtcggccagtgcggccagcgtgtcttgagccgtacgccgcggcatgccggtcgcctcgacgatggccgggacgctgacagcggtgccgctgtcgatcagccaggcgacatagagccggcggtagaaactgcttttggtcttgctgaccgtcatgtcggtgcttccagtcggagcacgcctgccgttagcgggcgcgcggggccacggtgtcattgcagcgtcagcatcgccatataagcgacagcgccagcggtatagccaagaaacgcgagcaggctgacccgcttgacgtaccaggtgaaactgatcctttccatgcccatggcggccacgccggcagcggagccgatgatgagggtgctcccgcctgtgcccgcgcagtaggcgagcatctcccagaaatgcccgtctacgacgaattgcgaaagccagtcggcatcctccggcgaagccgcggccaccattgccggatccgccagcggatacatcttcatcgcgccggccaccagcggcacgttgtcgaccactgccgacagcaggccgatgctgtaattgatcggatagatatgccccagcgactcgcgcagcagcagggcaacctgggtcagatgcccggcggtcgccagggcggcgacggccagcaggatgccgaggaagaacagcacgctgggtgtatcgaccttgcgcagcacgccgaccaccgacagcggatgcttgtgctcgtcttccttgtcgcggtgcagaaactcggtcgcgatccagagcacgccgaggccgaacaggatgcccatgtacggcggcagatgcgtgacggtcttgaataccgggacgaacaccagggcgcccaggcccagcgccaatacggtattgcgctcgaatgcggtggtttccggcggttggtgctcgcccaggtgggtccgggcgcggggccgcggtgcctcgccacgcaatcggaagctgagcaccagcaggggcaccagcaggcagatcaggcttggcaggaacaacccgaagatgacccccgaggcggtgatctggttgccgatccagagcatggtggtggtgacgtcgccgatgggcgaccaggcgccgccggcgttagcggcaattaccacgacgccgacgaacagccagcgctcgggccgcccgcggatcagcttgcgcaatagcgagaccatcacgatggtcgtggtcaggttgtccagcgcggcggagaggaagaaggtcagtagcccgacgatccagagcaggtggacgcgccgacgggtctggatgcgatcggtgatgaccttgaagccctcgtgcgagtcgatcagttcgacgatggtcatcgcgccgagcaggaagaagaggatttccgatatttcgcccagatggtggcgcaaggcttcgatgaccagctccgctggcccgcccggggcgtgtgcggccgcttgtggcgagatgatcgaatcggcaccgagcaccagcactgtccagcagaacacggcggtcaggatggccgcggcggccttgtcgattttcagcggatgttccagggctatgcagagataaccaaggacaaacacaacagccatgaatacatacatctacgaggtccctttttattttgatcaccgtaccggccatgctcggggtggcgagccggtagaagcgtggtgtccgcatgcgtgcagtcgacgagctggcgatctcctgagctcagaacggccgacggcggcacctgctgagcaggctgcgttgggcgtggggcaggtcaggagcagcgtttggaccggcgcgccggcgtttttcctcttggtggatccggataatcaatcagccggcccgctcgtggtttgtcaccgatcaagcggaaaaggcctgaaacaaaaaggccagcacgtcgagtgctggcctttggttgttacagactcgcgatgcgctcgcgctgctcgagcagtcgcgccttggcgtgttcggcctcggccagcttggcgcgctccttctcgatcacctcggcgggggccttgtcgacgaagccggcgttgccgagtttgccgccgacacgcttgacctcgccatcgaaacgggcgatttccttgtcgaggcgggcgagttccgcgtccttgtcgatcagccccgccatcggcaccagcacctgcaagtcgccgaccagtgcggtggcggagagcggtgcttcctcaccttcggcgagcacgcggacgctttccagcttggccagtttcttcagcagcggctcgttgtcggccaggcgacggcggtcggtatcgctcgcattgccaagcaccacgtcgatgcgcttggccatggagatgttcatttcaccgcggatctgacggatgccgagcatgaacgccttgacccactcgatatcgtcctcggcggcctcgtcgaggcgctccgggttgaactccggccagggctgcagcatcagcgtcggaccggacttgccggccagcggcgccacgcgctgccagatctcttcggtgatgaagggcatgaacggatgtgccaggcgcaaggcggtttccagcacgcggaccagggtgcggcgggtgccgcgctggcgttcggcactggcgctttcgtcccagagcaccggcttgaccagctccaggtaccaggcgcagtactcgtcccagatgaactcgtagagcgcctgggcggcgaggtcgaagcggaaggcttcgagctggcgattgacttcgcactcggtgcgctgcagcgcggagatgatccagcggtcgaccgaagacagctcgacggcttcaccgttgacgccggtgtccttgccctcggtgttctcgaagacgaagttcgccgcgttccagatcttgttgcagaagttgcgataaccttcgacgcggcccatgtcgaacttgacgtcgcggccggtggaggccagcgagcagaaggtgaaacgcagggcgtcggtaccgtagctggcgatgccttcggggaactcgttgcgggtctgcttggcgatcttctcggcgagcttgggctgcatcatgccgctggtgcgcttttgcaacagctcatcgagcgtgatgccgtcgacgatatccagcgggtcgagcacgttgcccttggacttggacatcttctggccctggccgtcgcgaaccaggccatgcacgtacaccgtcttgaacggaatctgcccggtcaggtgagtcgagagcatgatcatccgggcaacccagaagaagatgatgtcgaagccggtgaccagcacgtcggtggggtggaaggtcttgaggaaatcggtctgttccggccagccgagggtggagaaggtccacaggccggagctgaaccaggtgtccagcacgtcatcgtcctggcgcagctcgacctcgttgccgaggttgtagcgggtccgtgcttccatctcgtcgcggccgacatagacgttgcccgcttcgtcgtaccaggccgggatgcgatggccccaccacagctgacggctgatgcaccagtcctggatgtcgcgcatccagctgaaatacatgttctcgtactgcttgggtacgaactggatatcgccattctccacggccgcgatggccttttccgccagcggcttggtggagacgtaccactgatcggtcagccagggctcgatgatggtgcccgagcgatcgccacgcggcactttcaacgcgtggtcgtcgatcttctccaacaggcccatggcctcgaactcggcgacgatggccttgcgcgcatcgaagcgatccatgtgcgcgtaaccgtccggcaggctggcgtcgaccttgtcgttcggcgtgccgtcgatgttgaacacctgcgcgcggcccaataccgcggcgttgcgatcgaagatgttgatcagcggcagacgatggcgcttgccgacctcatagtcgttgaagtcatgcgccggggtgattttcacgcagccggtgccgaattcgaggtcgacatagtcgtcggcaacgatgggaatcaggcgattgaccagcggcagcatgatgtggcggccgatcagattcttgtagcgctcgtcttcgggatgcacggcgaccgcggcgtcaccgagcatggtctccgggcgggtcgtggcgacgaccaggtaattcttgccatcggccgtcttgcaaccatcggccagcgggtagcgcaggtgccagaggtggcctttctcgtcgtggttctccacctccaggtcggagatggcggtgtgcagcttggtgtcccagttgaccaggcgcttgccgcggtagatcaggccgtcttcatgcagacggacgaaggcttccttcactgcgttggacagaccggcgtccatggtgaagcgctcgcgcgaccagtcgaccgaagagcccagccgccgaatctggcgggtgatattgccgccggactcctccttccattcccataccttgtcgagaaacttctcgcggcccagatcatgacggttgacaccctgagcgccgagctggcgctcgaccaccatttgcgtggcgatacccgcgtgatcggtgcccggctgccagagggtgttacgcccctgcatccggcgccagcgaatcagggcgtccatgatggcgttgttgaagccatggcccatgtgcaggctgccggtgacgttcggcggcgggatcatgatggtgtagggctcgcccgacccctggggtgcgaagtagttgttcgattcccaggtctggtaccaggaggtttcgatggcgtgcggctggtaggtcttgtccatgcggcgggacccttagaacggctgatcggaaaagccggcaagtataaaggcaaagtgcgcgaggggccgaatcgcaatgccgcttttatgcggcggataggcgaaataccgctctgcatgggcgccgagcatgctggcgacgcccggtgcagtgtgccggcgtcaagggcggtgcgatttgatcagctgctgcgcgcgagcctccaggcggttgcgtagctcggcttcaatctgcgggacgaagtcgtcgatgacatcctgcaggataagctgcgccgcggtgcgcaattcgtggtccagatggcgctcggcgagcgtgcgaaacgcggtgcgtaccgctggctctcgcgtttcggattgtgccgcggcgtgcggcgcgggctcgacgatttccgacagcagcggaatgctgtccggatccagggactcgcccgatagcggcgggtcctggtcgcctagcagggcgcggatcgattccaggtcgtcgagaagatgggcggctttattgggtggtgtttgcgtcatgtacggtgcattccgggaattaagcgtccaggcgggtgatggcgctcctgaaaacgggccgtggtcggacggccaaaggggcatggcggcgcgggagcgttcgctgctgcccgtgctcgctacaattcgaccctcttcggatcatagccgcgctgccggtagaggcgaaaattgtcccggcagacggtcaatagctccggctgctggttgacgatctcgatcacacggctgaactgatcgatatgcgcagatatcgaggtggtcagattgatcagcaagccttgagcggtagccggcggctgttccgtgccgatcaccaccggtgcgaggggatcgtcctcgtgaagctcgtgcggaatgaagcgctcggcgcgaaagctccacagcagctcgtccagctccgtgcactgatggttgtcctgacagcgaatgaataccggcatgccgtgctgccagcccttgctcgccagctggcaggccgctctggcgcggcctgccggttcgcggtcgggcaacacgtaaaattcgatacgtgtcatgccggggtcccactcatccatctcatgcctgttcgacccggtccagcagatactgggtcagcaggggaacggggcgtcccgttgcgcctttttccttgccgccgctgatccaggcggtgccagccacgtccaggtgcgcccaggcgaattccttggtgaaacgcgagaggaagcaggccgcggtaatggtgccggccttgggcccgccgatgttggcgatgtcggcgaaggggctgtcgagttgttcctggtactcgtcgaacagcggcaattgccaggcgcgatcgtcggccttctggccagcacccagcacttgctgcagcagctcgtcgttgttgcccagcaatccggaggtctggctacccagcgcaacgatgcaggcaccggtcagcgtggcgacgtcgatcacggcgcgcggcttgaaacgctcggcataggtcagcgtatcgcagagcaccaggcgcccttcggcgtcggtattgaggatctcgacggtttgtccgctcatggtggtgacgatgtcgccgggacgggtggcattgccgctgggcatgttctccgcgcaggcgagcaggccgacgaggttgattggcagttgcagctccagagcggcgcggaatgtgccgagcacactggcggcgccgcacatgtcgtatttcatttcgtccatgccctggccgggcttgaggctgattccgccggtgtcgaaggtgatgcctttaccgaccagcgcgtagggctgttcgcccttcctgccgccgttgtactgcatcacgacgatgcagccgggttgggcgctgccctgggagacggcgagaaacgcgcctgcgcccagctcgcgcagcttcttctcgtcgagcacctcgaccttcaaccccttgaacgtcttgcccagctgcctggcctggtccgccacgtagttcgggtggcagacgttcggtggcaggttgcccaggtcacgagcgaagctcatgccggcggttatcgccgcggcgtggcggatcgcctgttcaacttgcgcctggtcggccttgtcgcagagcagggtgatcttgccgagtttggaggcgtcgttctttttgctcttgaactgctcgaacaggtactgaccgtcggccagcacttcgaccagcatgcgggcccgcgcataggtgtcacggtctttgacttgcacatcctgcacggcgaaggtcgcatcgctaccgccaagacccttgatgacgccgagcgcagcgcccgcagccttgcgccattggcgcgcatcgagctcgcccgccttgccggtgccgacgagcaggacgcgttcggctttgaggcctggcacgctgtgcagtaataaggtctggcccggcttgccggacagatcgccgcgcttgagtatcgtgctgatgacaccgccgctggcctggtccacgctttgcgctacggggcccagctgttggttttcattgacaggcagaaccagcgtcgcggtttttgccgcagcggctttggtgttttttacaacaaattccatggcgtcgagtccccaagacaaagagtcgggtttgcaggataatgccgggcttgttttccggtggttcgaccaccggggcgttgggggcgtgcttcgtgaagccccaatgccctgttgcgggcggaccggctattggcggctagtttgagcgtagccgccggagcctgacaaccctggagtgtccggtttgatcgtctttcgttatctgtcccgtgagttgctggtgaccttgagcgcggtaagtgccgtgctgctggtgatcatcatgagtggccgtttcatcaaatacctggcgcaggcggcgcaggggcttctcgatccgggtgtgctgctgatgatcatggggttccggctgccgggcttccttcagctgattctgccgctggggttgtttctcggcatcctcttggcctacgggcgactctatctcgatagcgaaatgaccgtgctgtccgccacgggcatgagtcagcgtcgtctgctggcctacagcctcgccccggccgctctggtcgcagctctggttggttggctcagcctcggcctggcgccgcagggtgtggccgaggtcgaccgcatccttaatgaacagcactcgctgaccgagttcgatacgctggttcccggtcgttttcagaccctgcgcgacggcacccgcgtgacctatacccgtgagctgaccgccgatcgcaccgagctgtccggtgtgttcatctctgaaaccaatctctccagtgccactggtgagaaacgcgggctctcggtgttggtggccgaaagcggccgtcaggaaatccagccggacgggagtcgctacctgatcctggaaaacggctatcgctacgacggcaatccgggccaggccaattaccgggcgatccagtacgacacctatggggtgttgttgcccaaacctgaagtcagcgtcgagttgagcgcgcgcgaggcgatgccgacccgcgaactgttcggcagcgacaacattcggctgcagtccgagctgcaatggcggctgtcgcttcctctgctggtcttcatcgtcacactgctggccgtgccgttgtcgaaggtgaaccctcgtcaggggcgcttcctcaaattgctgcccgccattctgctgtacatgacctacctggcgctgctcatcgcggcccgtggttcgctggacaaggggcgcatccccccgtccctgggcctctggtgggtgcacggaatcttcttttcgataggaatgctgatgctttactgggaaccgctgaggctggctttcgacaagcaccgagccaggtcgggggctgctcatgcgtaagctcgatcgttatatcggcagccatgtgttgctggcgattctcacggtgctcggcatcatcgtcggcctggcgctgctgttcgctttcatcgacgagctcggtgatgtgaagggcagttacggcacgctggatgctgcggtttacgtactgctcacgacgccgtcgcggatctacgagatgttgccgatggctgccctgatcggttgcctggtcggtctgggtactctggccagcagcagtgaactgaccatcatgcgcgctgcgggcgtctcgctcgggcgcatcgtgctcgcagtgatgaagccgatgctgttgctgatgctggtcggtgtgctgatcggcgaatacgtggcgccctggagcgagaacattgcacaggccaaccgctccgcggcacagggcgcaggtgaggcgcaaagcagcaagcgcggcctctggcatcgtcagggtgacgagttcgttcatatcaatgcggtgcagccaagcggggtgctgctgggcgtcacccggtatcgcttcgatgagcagcgccagctgttgtcggcgagttttgcgcgtcgcggccgttacgagggcgaccagtggctgctcagcgatgtgtccaccacccatttcaggggggatcacaccgaggtgacgaaggcggccgaggagcattgggatgtacagctgacgccgcagctggtcggtacggtggtgatggagccggatgccctgtccgtcacagggctgtggcgctatatccattacctcggtgagcagggtttgaataacagtcgctattggctggcgttctggaccaaagtcctgcagccggcggtgacggttgcgctggtcctgttggcgatctcgttcattttcgggccgctgcgctcggtcacgcttggccagcggatcttcaccggggtcatcgtcggcttcgtgttccgcatcctgcaggatctgctggggccggccagccaggtcttcggtttttcgccattactggctgtggcggtgcctgcggccatctgcgcgctggcgggcgtcttgctgctgcggcgtgccggctaaggcggcgcttgcggaaaggggcgatctggcccctttcgcgtcatttcttatggatgttcttcgggagttggacgacctggctctcggaatagatgtcatgccaggtgcgatgttgcttgtcccagagcatccaccagtagcccagtcccagggcgagccaggacatgatggcgagcaggaaacgcagcagcgcctgccagaggtcgatggccgtcccgtcggcattttgtatccgcacgccccagacctgcatgccaagcgtctggccgttgtgtgtccagaacttggcgaagaaggcgaagacggtaaacagcaggagcgtcgaaaggatcgggtcgatatccaggccgccagattcggccagtagcttgagcgcctcaccgccatacaaggcccgcaagaccacctgttggtagaacagcgtgacgaccatcatcagcgcgatcgaaagaaacgaatcgtaaaacagggcggccaggcggcggagcaggccggcggcaggaaactggccctgcgggttaagctgatggttgctcatgcgtggagtctcgctggaaaggcagtcgcgcattctacggaatcgcgcgcataaaaaagcccctgatggtgacatcaggggcctttcggtacggggcttattcctggatttgaacctggtcagcctgcatgcctttttgaccttgcacagcgatgaagctgaccttctggccttctttcaggctcttgaagccgttgccttcgatcgcgcgaaagtgcacgaacagatccggaccgctttcaggagtgatgaaaccaaaacctttctcgtcgttaaaccacttgacggtaccgttctgacgattcgacatagcgttgtatccttgaaactcaatagtggaacgccgctgcgtaagggcagcaggcggaaactggttgcaaggagtaaagagtcgaacgggatgtagcggatctgaagatctactgcatcaggtcacgattcaacggcgacccatgcaaacacagtgggcacactctacgataactcgccggccgatgccaagccctcggagtcatagagtcgcccacggcctgggacgcctgttttggcgtgtttcggtgtcgctgatccgctcgtctgccgctaccgcaagggcgggcggaaagaatcgcctggtttggcgtgactcggtggagtctgttgagcctatccgatgcctgaaggcatccactgctgtggggtgatgccgctactgctgtgcggttcccctgtcccagaggctctcgactgcctgtgggtgctgattcatggtgcctcgagagagactcgaactctcacgttgttaccaacggcggattttgaatccgctgcgtctaccgattccgccatcgaggcacagtgggcgcgcagtatagggatgcgatgcggggcggtcaatcacctggcgtggtcagaatgaggtgtttccgctaagctttgcgcccccgaagctccgtgctgatctcttttaatgcaagtctccgatttttcctttgaactacccgattcgctgatcgcccgtcatccgctgcccgagcgccgtgccagccgtttgctggtgctcgacggcccgagcggtcgattggagcatcgccgctttgccgagttgctcgattacctgcggcctggcgatctcatggtgttcaacgatacccgcgtcattccggcgcgcttgttcggccagaaggataccggcggcaaggtcgaggtgctggtcgagcgcgtgctcgatgcgcgtcgcgtgttggcgcatcttcgttcgagcaaatcgccgaagcccggtgcgaaaattcatatcgacggtggcggtgaagcgctgatgctggcgcgccatgaggcactgttcgagctggaattcggtgaagacgtcctgcctttgctggaccgtgtcgggcatatgcctttgccaccttatatagatcgtcccgatgaaagtgccgatcgggagcgctaccagaccgtttatgcacagcgtgccggtgcggtggctgcgccgacggcgggtttgcatttcgatgcgcagctgttggatgcgctggagcagaaaggggtcgaacgcgcgttcgtgacgttgcatgtgggtgccggcacgttccagccggtgcgcgtcgagcgaatcgaagagcaccgtatgcaccgggagtggcttgaggtggggcagggcgtggtcgatgccgtggcagcctgtcgcgcacgtggcgggcgggtgatcgcggtaggtaccaccagcgtgcgctcgctggaaagtgcggcacgcgacggcgcgctcaaagcattcagcggcgataccgacatctttctttacccgggcaagccttttcatgtggtcgatgccctggtcaccaatttccacctgcccgaatccaccttgttgatgctcgtctccgcgttcgccggctatccggaaaccatggcggcttacgccgaagccatcgccgagggttaccgcttcttcagctacggtgatgccatgttcatcacacgcaatccggccccgcgtggccccgaggattcccaatgagccgtacttgccacatgtccttcgaactgctcgcgaccgaggggcgagcgcgtcgtgggcgcttgaccttcccgcgcggtacggtggaaacgccagcgttcatgccagtgggtacttacggcacggtcaaaggcatgttgccgcgcgatatcgaggcaatcggtgcgcagatcattcttggcaatacctttcatctctggctgcggcccggtaccgaggtcatcaaggcgcatggcgacctgcatgatttcatgcaatggcaaggaccgatcctgaccgattccggtggctttcaggtcttcagtctgggcgcgatgcgcaagatcaaggaggagggcgtctatttcgcctcgccagtcgacggcgccaaggtgttcatgggaccggaagagtcgatgcaggtgcagcgcgatctgggctccgacatcgtcatgatcttcgatgaatgcacgccgtatccggcggatgaagaggttgcgcggcgctcgatggagctatccatgcgctgggcgcgacgctccaaggatgcacacggcgacagccctgccgctttgttcggtatcgtccagggtggcatgcacgagtcgctgcgcatgcggtcgctcgaagggctctgcgaaatcggcttcgatggtctggctattggcgggctttcggtcggcgagcccaaggaggagatgattcgcgtgctggatttcctcccgccgcagatgccggccgacaagccacgttacctgatgggggtaggtaagccggaggatctggtcgagggtgtgcgacgcggtgtcgacatgttcgactgcgtgatgccgacccgcaacgcgcgcaatggccatttgttcaccgacagtggagtcgtcaagatccgcaacgccgtgcaccgtttcgacgatgctccgctggaaacggggtgcgactgctacacctgccagcatttctcgcgcgcttatctgcatcatctggataaatgcggcgaaatgctgggcagcatgctgaatacgatccacaatttgcgacattatcagcggctcatggctggtttacgcgatgctatccaacagggtacattggcggcctttgtcgacgccttctatgccaagcgcggcctgccaaccccgccgcttgcgtgacgaatccacacaactaaccgatccttgcaacaggagtgctacatgagctttctgattcccgccgcctacgcccaagaggctgccgccggtcccgctggtagcggcttcgagtggttgttcctggtcggcttcctggtcatcttctatctgatgatctggcgtccgcaggccaagcgcgccaaggagcacaagaatctgatcggcggcctgcagaagggcgacgaagtcgttacttccggtgggatcgccggcaaggtcaccaaggtctccgatgacttcgtcgtgatcgaggtttccgactcggtggagctgaagttccagaaggtggcgattgcggcaacgctgcccaaaggcacgctgaaagccatctgagctgacttctactcaataccaacgacggggcgcgcaaggcgccccgcgtcattgcacgggctgcgtcatgctcaatagattccctctctggaaatacctgctgattgtggtggtgcttggcatcgcctgcatttattcggcacccaatctgtatcccgatgacccggctgttcaaataaccggcgctacgacttccctcaacgtcaccgaggccgatctcgatcgtgccagcaaggcgctggctgccgctggtatcgaagtcaaggcgacgagcctggacgagcaaggccgtggtggtctcttgcggctgatcgatcagaatgaccagctgccggctaaggatgtagtgcgacgggcgctgggcgatgcctacgtggttgcgctgaacctggccccaaccacgccggagtggctgcgcgccctggctgcgagtccgatgaagcttggtctggacctgtcgggcggtgtgcacttcctgctggaagtcgacatggacaaggccgtcgagacccgtctcaacgtgtacgaaggcgaggtcaagtcgctgctgcgcaaagagcgcgtccgttatcgtagtttgccgcaggccaacaacggcattcagctcggttttgccgacgaggccaccctgtccgcagctcagtcgctgatacgcaagaacttcaatgatttcgatctgactaccactgagcgcaacggtctgcaggtgctccgcctggcgatcaccgaggccaagcttgccgagattcgcgaatactcgatcaagcagaacctgaccaccgtgcgcaaccgcgtcaacgagctgggggtttccgagccgctggttcagcgtcagggtgccaaccgcatcgttgtcgaactcccgggcgtgcaggacacggccgaggcgaagcgtatcctcggcaagacggccaacctcgagtttcgtctggctgccgaggcggacgcgccccgcgcgaccaccgagacgttcgagttccgcgagcaggggcgtccacccgtgcagctggagcgcaacctgatcatcacgggtgaccaggtgaccgacgcgcaggccagcttcgatgaaaacggcaggccgcaagtgaacattcgtctcgatggccatggcggcgacctgatgaatcgggcgacacgcagcaatgtcggtcgcagcatggccgtgatcttcatcgagcagcgcccgaccactcgctatgtcaagcagatggtcgacggtgtcgagcaggaggttcgagtcgagacgtttcaggaagagaagaagatcattagcctggcgaccattcagtccgcgctcggtagccagttccgcatcaccggcctcgatggccagggcgaatcgtccgagctggcgctgctgctgcgcgccggcggtctggcggcgccgatgtacttcgcagaagagcgcaccatcggtccgagcctgggcgccgagaatatcgatctgggcatcaacgccgcgatgtggggcttcctcttcgttgcggtcttcatggtgctgatctacaagtttttcggtttgctggccacggttgccctgctgttcaacatggtggtcctgactgcgctgatgtcgatgctgggggcaacgctgaccctgccaggtatcgccggtatcgtgctgaccatggggatggcggtcgacgccaacgtgctgattttctcgcgcatccgtgaggagatcgccaatggcatggccattcaacgggcgatacatgaaggcttcgatcgggctttttcggcgatcgtcgacggcaacctgaccacgctgctggttggggggattctgttcgccatggggacggggccgatcaaggggttcgccgtgacgctctcactcggcatcatcacttcgatgttcaccgccgtcatcgtgactcgcgccatggtcaacctgatctacggtggccgcgatctcaagaaattgtggatttaaggggctagctcgatgaaacgcgtaatcaacttcatgggcgtgcgtcatctggcgtttgccatgaccgtcgtgttgacgcttgcctcgctcgccagcctggcgatcaaagggctcaattttggtctggatttcaccggggggacgctgatcgagctgtcctatgagaagccggtggctctggatcaagtccgcgctcagctgtcgcgttccgacttcggcgcggcggttgtgcaaagtttcggtgccacgaccgatgtgctggtgaggatgccgggcgacgatcccttgctcggcgagcgcatcgcagaggcgttgcgcagcggcgaagatgctgctgccgtcaccgtcaagcgcgtcgagttcgtcgggcccgccgttggcgaagaactgcgtgatcagggcgggttgggcatgttgctcgctctgggtggcatcctggtatacgtcgccttccgctttcagtggaagttcggcctgggagcggtgctctcgctgttccacgacgtgatcctggtgctcggcgtcttctcgctgttccagataaccttcgatctcactgtgttggcagcggtattggcagtcattggctactcgctcaacgacaccatcgttatcttcgaccggattcgcgaaaacttccgcatcctgcgcaaggcggagctgctggagaacatcaacatctccaccacgcaaaccctgctgcgtaccctggcgacttccgtgtccacgctgctggcggtcggtgcgctgatggtcttcggtggcgagaacctttggggtttctcgctggccttgttgatcggcgtcggtgcgggcacctactcgtcggtgtacgtcgccgggatgttgctggtctggctgaatctcacccgtgacgacttgatcccgcctgttgtcgaggaggtcgacgagcttccctgagcgaatgaacttctgacggctcgcgatgcctaacgggcgccgcgagcctggctcgtcagaagaagggaaaaggcatgaacaagtcgatgctggttggtagtgtcctgggggctgtggtcgtcacagctggtggtgcgttcgccacatataccctggtcgatcgggggccgaaattcgctgaggtactggcggtcgagccggtcaaggaaaccatcaagacgccgcgcgaggtttgtcgcgaggtgaccgtgacgcggcagaagcccgtgcaagactccaaccgtattgccggtaccgccgtgggagcggtagtcggcggtctgttgggcaatcaggtcggtggcggcaatggcaagaagatcgccaccgtagtcggcgcggtgggtggcggttatgctggaaaccaggtgcaaggccgaatgcaggcgaatgacacctataccaccaccgaaacccgctgcaacacggtcaccgacagccacgacaaagtggttggctatgacgtcaagtatcagttgaacggtgccgtcagcacggtccgaatggatcgggatcctgggagccagattccgcttcgtgatggacagttggtgttgactcagcagtgagttggctggttaatgaaaaaacgccctgtcgggcgttttttttgcgtctgatttgttgtgtcagcgcttcaatgcaggggtcaggtgcggctggattgcggtcagcacggctttgaagcatttggtgttgcccgccacgatctggcccttctcgaggaattcgtggctaccgctgaagtcgctaaccagtccgcccgcttcctggatcagaagggcgcctgcggccatgtcccattcggatagcccgaactcccagaacgcgtcgtagcggccggctgctacataggcgagatccaggctggcagcgccggcgcgacgcagccccgctgtttgcccgaccaggctgcggaacatgttcagatagctgtccaggttgtccatctggccgtcgcggaacgggaatccggtaccgagcagggcgccttccaggcttttgcgcgcgctgacacgcaggcggcgaccgttcagtgccgcgccacggccgcggctcgcggtgaattcttcctggcgtaccgggtcaagcactaccgcgtgttcgaggcggccgcggtatttgcatgcgatgctgaccgcgtagtgggggacgccgcgcaggaagttggtcgtgccgtccagcgggtcgatcacccacaggtaatccttgccgtcgccactgccttccagcagtccgccttcctcgccaaggatgccgtggttgggataggccttgcgcaatgcggcaatgatgagctgttcggcgctgcggtcgatctccgagacgtaatcgcgcgcgtccttttcgctaaccgagatcacgtccaggcgctcggtggaacgaacaatcatttcgccagcgctacgggcggcgcgcagcgcgatattcagcatgggctgcatcgatcaaatacctggtcgtttaaagaaagccggcaattctatcagaaagctcgctcgggtgttacgggcttggagaccatcggagcggcaatggcgaaggcgcaagtccttcctgtaagctttcgctttgctttttggtcgagaacaacagtgtcgcttcagaacattcgcgtggtgctggtcaataccagtcatgccggcaacattggtggcgcggccagggccatgaaaaacatgggcctgtcccgtctggtgctggtcgatccagaggattttccgagtccggacgcggtcgcccgtgcctcgggcgcctcggatgttctcgattcggcgcaagtcgttgcgacgctggaggaagcgttggtggggtgcagtctggtgctgggaaccagtgcgcgcgaccggcgtattccctggccgctgctcgatccccgcgaaaccggttcggtctgcctggagcaggtcgagcgaggaggtgaggttgcgctggtgttcgggcgcgagtatgcggggctgaccaacgaggagctgcagcgctgccaataccatgtgcacatcccctccgatccgcagttcagctcgctgaatctggctgctgccgtacaggtgctcgcatacgaggtgcgcatggcttggctcgcggcgaacaatcagccgagcaagcaggaaaagctcgaaaccacctcgatgctcaatgcacagccggtgacggccgatgagttggagcactactacgggcatctcgaggaaaccctggtcgagatcggttttctcgatccgcaaaaaccccggcaccttatgccccggttgcgcaggctttatggccgcagcggtatcagcaagctggaaatgaatatcctgcgcggcatcctcacagaaacccagaaggccgtccgcggcgaaccccacaagcggagatctgattgatgttcgatcgcatgcgcgaagatatccagagcgtttttcatcgcgatccggcggcgcgtaacgcgttcgaggttgtcacctgctatccggggttgcatgcagtctggtttcatcgggtttcgcattggctgtggcagaacgactgcaagtggctcgcgcgaatgaattcgaacttggcgcgctggctgaccgggatcgagattcatccgggcgcgcagatcggtcgtcgtttcttcatcgatcacggcatgggtatcgtgatcggcgagaccgcgcagatcggcgacgacgtgacgctctatcacggcgtgacgttgggcggtaccagctggaacaagggcaagcgccatccgaccctcgaggatggggtgatcgtcggtgccggggcgaagattctcgggccgttcacggtgggcgcgggcgccaaggtgggttccaatgccgtcgtgacgcgtgcggtgccggctggcgccaccgcggtgggtattccggggcgggtgatcgtcaaggccgatgacgagcaagaggccaagcgcaaggcgattgccgagaagatcggcttcgacgcttatggcgtgaccgaggatatgcctgaccctgtggcgcgggccatcggtcagttgctcgatcacgttcaggcggttgaagagcgcatggagggcatgtgcaaggcgttgacggcactgggtagcgattactgcgccaagcagatgcccgaactgcgcgaagaagatttcgccgaggtcaagagcgtcggcgacgagccgcgcgcctgaagtgcggcaggcggagcgtgctgctatcatgcacggcctcgtagcgccgtggcgggtcttcgtccggcgatcccgctccgcctacagccaaagtccgagtaattcgataggtcttatagttgatctaaatagtcgggtattgcatacttgcctcaaaccatgatgcttggtgcgaaccgatgcgattgactaccaaaggccgttacgccgtcactgcgatgctcgaccttgcgctgcatgcgcaacacgggccggtgtcccttgcggatatttccgagcggcaaggcatctcgctttcctatcttgagcaactgttcgccaagctgcgccgtggcagcctggttaccagcgttcgagggccgggtggtggttatcaattgtcccgtgaaatggcgggcattcaggttgcgcaagtaatcgatgcggtcaatgaatcagtcgatgccacccgttgccaagggctgggcgattgccattcgggcgatacctgcctgacccatcatctgtggtgcgatctgagccagcagatccatgagttcctgagtggtatcagtctggcggatctggtgatgcgtcgcgaggttcaggaagtggctctgcgccaggacatgcgtcgcgccaatggtcagacttcgcaactggataagattgaagcgtccgccgtcgaatgagcaggacgacagcctgataggagatacctgatgaagttgccgatatacctggattattcagctaccacaccggtcgatcctcgcgttgccgagaaaatgatcgaatgcctcactgccgaaggtaacttcggtaatccagcatctcgttcccacgcctttggctggcgcgccgaggaggcggtcgagaacgctcgtcgccaggtcgctgagctggtcaacgccgacccgcgtgaaatcgtctggacctccggggcgaccgagtcggacaacctggcgatcaaaggtgccgcccacttctacgcctccaaaggcaagcacatcgtcaccagcaagatcgagcacaaggctgttctggatacggcccgccagctggagcgtgaaggctttgaagtgacctacatcgagccgggcgaagatggcctgatcacgccggcgatggtcgaagccgcgctgcgcgacgacacggtgctggtgtcgatcatgcacgtgaacaacgagataggcacgatcaatgacatcgccgccattggcgagctgacccgtgcgcgcggtgtgctgtttcatgtcgatgctgctcaatcgaccggcaaggtcgagatcgacctggagaagatgaaggtcgatctgatgtccttctcggcccacaagacgtacggcccgaaaggcgtcggtgcactgtacgtgcgccgcaagccgcgcgtacgcctggaggcgcagatgcatggcggtggccacgagcgcggtatgcgctcgggaacgcttgcaccgcaccagtcggtgggcatgggtgaggcgttccgcatcgccaaggaagaaatggccgcggagaacgagcgaatcgccaagctgcgcgaccgtttcttcaagcaggtcgagcacctggaagagctttatgtgaacggcagcatgacctcgcgggtgccgcacaacctgaacctgagcttcaactacgtcgagggcgagtcgctgatcatggcgctcaaggacctggcggtttcctctggttcagcttgcacgtccgcttcgctggagccgtcctatgtgttgcgtgcactcggtcgaaacgatgagttggcgcacagctcgatccgtttcaatttcggtcgattcaccacagaagaagaagtcgactacgccgcgcagaaggtcagcgaggcggttaccaagctgcgtgagctttcgcccttgtgggacatgttcaaggatggcgtcgacatttcgcaggtcgagtgggctgcccactgatccgtcgagtctcacatacctgattcaatgaggattgcaccatggcatacagtgacaaggtcattgaccattacgaaaatccccgcaacgtcggcaagttcgacgctgaggatccctccatcggtaccggtatggtcggtgctccggcgtgcggcgacgtgatgcgcttgcagatcaaggtcaacgagcagggcatcatcgaagatgccaagttcaagacctacggctgcggttcggccatcgcttcgagctctctggccactgagtggatgaaaggcaagacgctggaagaagcggaaaccatcaagaacacccagttggctgaagagctggcattgccgccggtgaagattcactgttcggtgctggccgaagacgcgatcaaagcggccgttcgcgattaccgtgagaagaaagggttgcctcaggcctaagggggtatcgatggctatcagcatgacgaccgccgctgccaatcacgtgcgccgttcgctggaagggcgcggcaaggggcttggcgttcggttgggtgtacgcaccaccggctgctccgggctggcgtatgtcctcgaattcgtcgatgaggcagctgcggaagactcggtcttcgacagccacggcgtgaaggtcatcattgatcccaaaagcctggtgtacctcgacgggacggagctcgacttcgtccgtgaagggttgaacgaaggtttcaagttcaataaccccaacgtacgtggcgaatgcggctgcggcgagagcttcaatatctgaggacgctgtgggaactctttgtcactttgcgctattcgagttgcagcccgctttcgatctcgatcaggacatgctttcggctcgttatcgcgagctcgcccgcaaggtccaccccgatcggttcgccgacgcgggcgagacggagcagcgacacgccatcgagcgctcggcgaacctgaatgaggcctatcagaccctgaagacgccttcgcggcgggcccgttatctgcttacgctgcagggacgggaaatgccgctggaggcaaccgttcaggatccggccttcctcatgcagcagatgcagtggcgcgaggagctcgaagagttgcaggacgatgcggatatcaccggcatcgcttcgttcaagactcgcctcaagtcggcccagcaggcgctcaacgactcgttcgcgcgcatctggcaggacgactcgcagcgcgaagaagcggagcggctggtgcggcgtatgcaattcctcgacaaattgtcgcaggaagtgcgccaactggaagagcgcctcgacgactaaccctgcgcagcgtaaagcgttgcgcccgatatcagacagacatggccttacttcagatagctgaacccggacaaagcccgcaacctcaccagcgtcgtttggcagttggcatcgatctggggaccaccaattcactcgtggcagccctgcgtagtggcgtcaccgcgccgctggccgatgctgatggcgaagtgatactgccttccgcggtgcgttatcacgctgatcgcgtcgaagtggggcatggcgccaagcgtgccgccgccactgatccgttgaataccatcctgtcggtgaagcgtctgatggggcgcggtatcggtgatgtgaagcagctgggtggtcaactgccctatcgtttcagcgaaggccaatcacagatgccgttcatcgagacggtccagggggccaagagcccggtggaagtctcggctgaaatattgcgcacgctgcgcgagcgcgccgaagccgtgcttggcggtgagctggtgggggccgtcatcacggtgccggcttacttcgacgaggctcagcggcaggcgaccaaggatgccgcccgactggccaatctgaatgtgctgcgcctgctcaacgaacctaccgccgcggctgtcgcctatggtctggatcgcgaggcggagggcgtcgtggcgatctatgacctgggtggtggcaccttcgatatttcgatcttgcgtctgacccagggcgtgttcgaggtgctggctaccggcggagacacggcgctgggcggcgatgatttcgatcatgccatcgctggctggatcctggcgcaggcgggcgcctcgcaggacctcgatcctggcgcgcagcgcgaagtgttgaagatcgcgtgtgatgcgaaggaaaagctcagcgatgcggacgccgtcgaggtgcgctatgccgattggcagggcgcactgactcgcgagatattcaatgaactcatcgatccgttgatcgccttgagcctcaagtcatgccggcgcgccctgcgcgattcgtcggtcgagctggacgaggtccatgccgtcgtcatggtcggtggctccactcgggtgcctcgagtgcgcgagcgggtcggcgagatgttcggtcgcgagccgctgaccgatatcgatcccgatcaggtggtcgccattggcgcggcgattcaggccgagacactggctggcaacaaccgcgatggcgaggagcttttgctgctcgatgtgattccgctgtcgctgggtctggaaaccatgggtgggctgatggagaagatcatcccccgcaacaccacgattcccgttgcccgcgcgcaggacttcaccacctacaaagacggccagtcggccatgatgatccacgtgctgcagggtgagcgcgagctcatcgccgactgccgctcgttggcgcgtttcgagttgcgcggtattccgccgatggtcgccggcgccgcgaagatccgtgtgaccttccaggtcgatgccgatggattgctgagcgtatcggcgcgcgagctggcgtccggcgtcgagtcgagcatccaggtcaagccgtcctacggtctgaccgacggtgagattgcgcgcatgctggaagactcttttcacaaggccagcgaagacaaggccgcccgcgccctgcgcgagcagctggtcgatgcgcaacggttgctcgaagcggtcgagggcgccctggcggtcgatggcgagcgcctgctcagcgacgaggagcgcgcagccatcgagtcgcaaatgcagggtctgcgagaactgctcgacagcgaagatggcgtcgccatcgagcggcaaatcaaacgcttgagccagattaccgatgcctttgccgcgcgcaggctggactccaccgtcaaggctgcactggccgggcggcggcttaacgatatcgaggaatgacctagatgccgcaaattgtattcctgccccacgctgatcattgcccggagggagcggtggtggaagcgcagcccggtgagacggtacttgacgccgcgctgcggaacggcatcgacatcgagcatgcctgtgaaaaatcctgtgcctgcactacgtgtcatgtcgtgatccgcgagggcttcgcttcgctggaggcgtcggacgagttggaagatgacatgctggacaaggcgtgggggctcgagcccacctctcggctgtcttgtcaggccgccgtcgcggatgtcgacctggtcgtcgagatccctaagtacaccattaaccaagtttccgaaggccattgagggcgaggtgtagcatggcgctgaagtgggctgacgtattggatatcgcgatagaactggctgagcgcaagccggacgtggatccgcgttatgtgaattttgtcgaactgcatcgctgggtcgtcgagttgccggattttgcagacgacccgcaacgtggcggtgaaaaagtcctcgaagcgatccaggcggcctggatagaggaacgctagggctcggtttcgatatgcgacatgcgcatgctgccggtcctgcccgggtgatgctgcgctaagcggcgcatacccactcttataatttcaatcgggacccgcgtataattcgcgggtttactcgttcgctttaaccccatccttttcggagttttaaatggccctgcaacgcactttctccatcatcaagcctgacgccgtcgccaagaacgttatcggcgaaatcacttcccgtttcgaaaaagcaggcctgcgcgtcgttgcttccaagatggttcagctgtccgagcgtgaagccggcggtttctatgccgagcacagcgagcgcggcttcttcaaggacctggttgccttcatggtgtccggtccggtcatcgtccaagtgctcgaaggtgaagacgccatcgccaagaaccgtgagctgatgggcgcaaccaaccccaaggaagcggctccgggcacgattcgcgccgatttcgcggtctccatcgacgagaacgctgttcacggttcggactccgaagcttccgcggctcgcgaaatcgcttacttcttctccgccaccgaagtgtgtgcccgcattcgctaatcaggcgaaggtgaatccagatgaccgctatgaccggtaaagtaaatctgctggggctgacccagcctcagttggaaagcttcttcgattcgattggggagaagcgttttcgcgccggccaggtgatgaaatggattcaccattttggcgtcgatgacttcgacgccatgagcaatattggcaaggccttgcgcgagaagctcaaggcctgcgccgaaattcgcggccccgaagtcgtcagcgaggacatttccactgacggcacccgtaaatgggtcgtgcgtgtggcttcgggtagctgtgtagagaccgtctatattccgcaaggtgggcgagggacgctttgcgtttcttcccaagctggctgtgcgctggattgcagcttttgctcgaccggcaagcagggtttcaacagcaaccttaccgccgccgaggtgatcggccaggtgtggatcgccaataagtccttcggcaccatcccggccaaggtcgatcgcgccatcaccaacgtcgtcatgatgggcatgggcgagccgctgctgaacttcgacaacgtcgtcgccgccatgcagatcatgatggacgacctcggttacggtatctccaagcgcaaagtgacgctttcgacatccggtgtggtgccgatgatcgacgagctgtccaaggtgatcgacgtctctctggcgctttcgctgcatgcgcctaacgatgcgctgcgcgaccagttggtaccgatcaacaagaagtatccgttggatgtgctgttggcagcctgccaacgctacatttccaacctgggcgagaagcgagttctcaccatcgaatacacgctcttgcagggcgtcaacgaccagccagagcatgccgaagagatggtcgcattgctggcgaagattccctgcaagatcaatctgattccgttcaaccccttcccgcattccggatatgagcggccgagcaacaatgcgatccgtcgttttcaggacatcctgcataaagccgggcacaatgtgacggtgcggaccacccgtggcgaagacatcgacgccgcgtgcggccagttggttgggcaggtgctggatcgaacacgccgaagcgagcgctacatcgcggtgcggcagctgcaatccgagccagtgccggcacccgtcgctacgaatcgttcctgagggggatgttgttgatgatcctgcgcgttgcgctgctgttcttgctcgccggcttcatggctggctgtgtatcttcgggatcgggcaatccgatgcgtacttccgaaggccgcgacgaggcgcgagacgcctacatccagctgggtatcggctatttgcagcaaggtgagtcgtcgcgcgcaaaaacgccgctgcgcaaggcgctggaaatcgatcccaacagcgccgacgcgcatgcggccctggccctggtgttccagaacgaaatggagaaccagctggccgacgagcattaccgcaaggcgttgtcgagccgcaacgacgcgcgcatcctcaacaactacggtagtttcttgttcgagcagcaacgctacgaagaggccatggagcgcttctccaaggccgccgaagacaacctttactccggtcgttcacatgtcttccagaacatgggcatgaccgccctgaagctcggccagcgtgaacaggccgagacctactttacccgtgccctgcgtctcgacagccggcagccacgcgcgcttctcgagctggcgatattggcgtacgaagacaaggagtacgttccggcgaagcgttattacgatgggttcagcagcctgtccgagcaaactgcacgcagcctgctgctgggcattcgtctggcgaaaatccatcaggaccgggaccaggcggcgagcctgggattgcagctcaagcgcctctacccgggcacgcctgaatatcaacagtttctttcggagcaacgatgatagcgccccattccgagaccgctgccccgacgcccctgggcaatccaggcgagacccttcgtgccgcccgcgagagcaagaactggtcgctttcatcggtggccaagcagctcaacctgtcggagcgctcactcagtcagatcgaggcaggcgacttcagccagatgccagggcatacctttgcccggggctatgtccgggcctatgccaagttgctggggttggatcagaatcggctggtgcagcaattcgatcaacataccggtaccgatgcgaccggcagcagcgtcaacagcctggggcatatcgatgaacccgtgcgcctttcgcgcagcatggtgcgttttttcaccttgttgctgacgctggtgatcgcggtgggcgcttacctctggtggcaggatcgtaccgcgcgcaatgcggcaggaccttcggttacggctctcgagcggatcgaagtcgaggcggctgacggcacgaccgagatccatctgttggatcgtgcggacgaggcggacgaggcggatgaacctgccgcagacgagtcggtcggctcgcctgcagagccggtggatcaagccccgcagcccaccgatgacatgaacctgccgcaggcgcagcagcctgcagccagtgcaccggagcaaccggccgaggcggcacccgctcccgtggccgagcccgaacctgccgtgacggagaccgccgccgctcccgccgagccagaacctgtcgctccgggcgaaggacgactaacgctggactacaccgctgactgctggacacgtatcaccgacgctgacggcaaggtgctctatagcggcctggccaaggctggtagcagccgcacgctggttggcaagacccctatggacgtgcatctgggctttgcctccggagtgcaggtcagcttcaacggcgaagccgtcagtctttctggcaaaaagcgcggcgaaactgcgcgtctcaagctcggacagtaatcatgcatagcgagtcccctatcaagcgccggcccactcgaaagatctgggtcggcaatgttccggtcggtggcgatgcgcctatcgcggtgcagagcatgaccaacaccgaaacctgcgatgtcgaggcgaccgtcgcccagatcgagcgcctgcagcatgccggcgccgacatcgtgcgtgtctcggtaccgtcgatggaagccgccgaagccttcggtaagatcaagcagcgggtcggcctgccgttggtggccgatatccacttcgattaccagatcgcgctgcgggtcgctgaactcggggtcgattgcctgcgcatcaaccccggcaacatcggccgcgaggaccgtgtacgagcggtcgtcgaagcggcacgcgatcgcggtatcccgatccgcattggcgtcaatgccggctcgctggagaaggatctgcagaagaaatacggcgaaccgacgcccgaggcgctggtggagtccgcgttgcggcatgtcgagcatctcgatcggctgaatttccctgacttcaaggtcagcgtgaaagcctcggacgtgttcatggcggtcgcggcctatcgtttgctggcggacaagatcgaacaaccactgcatctgggcatcaccgaagcgggcggcttgcgctcgggcacggtgaagtcggcggtcgggctgggtatgctgcttgccgagggcatcggcgacaccatccgtatttcgctggcggccgatccggtcgaggaaatcaaggtcggtttcgacatcctcaagtcgttgcgtctgcgctcgcgcggcatcaatttcatcgcctgtcccagctgctcgcggcagaacttcgacgtggtcaagaccatgaacgaactggaagggcgtctcgacgacctgctggttccgatggacgttgccgtgatcggttgcgtcgtcaatggcccgggagaggccaaggaagcgcatatcgggctgactggcggtacgcctaacaacctcatctatatcgatggcaaacccgcgcagaagctgaataacgaaaacctggtcgacgagctggagcagctgatccgccgcaaggccagcgaaaaggctgaagccgacgccgcgctgatcctgcgtagctgattaaggaaccgatttgagcaagtccctgcaagccatccgtggcatgaacgacatcctgccggcccagacgccggtctggcgctacctggaaaccaccttcgcgcagttgctcgacagttacgggtatagcgaaatccgcttgcccatcctcgaatttaccgatctgttcgcacgcggcatcggcgagggcaccgatgtggtcgacaaggagatgtataccttcctcgaccgtaacgaagaatccctgacgttgcgtcccgaaggcaccgccggttgcgtgcgcgccgtgctcgagcatggcatgaccggcggcggtcaggtgcagaagctctggtacgcggggccgatgtttcgctacgagaagccgcagaaagggcggtaccgtcagttccatcagattggcgtggaggtcttcaatcagccgggcccggatgtcgatgccgagctgatcgtgttaaccgcgcggctttggaagcgcctgggaatggccgacgcggtcacgctgcagctcaatagcctgggttccagcgaggctcgcgcgacctaccgagacgcgttggtcgattatctgcgccagcacttcgaacagctcgacgaagacagccagcgccgactgaccaccaacccgctgcgcattctggatagcaagaatgcccagacccaggcgttgctggtcgatgcgccgacgctgcatgactatctcgacgacgagtcgcgggctcacttcgacggcctcaaggcgcgtctcgaggcggccgggatcaattatcagatcaacccgaagctggtccgtggcctggattattacggtcgtaccgtcttcgaatgggtcaccgacaagttgggcgcgcagggcaccgtctgtgcgggcggtcgctatgacggcctggtcagccagttcggtggcaaacccactccgggtgtcggtttcgccatggggatcgagcgtctggtgctgctgctggaaaccctggaactggttccggaggagctgaatcaaccggcgcatgcgttcatttgcgcgttcggcgaggccgccgagctcgcggccctgggccttgccgagcggctgcgcgatgccttgccgggccttcgcctactggtcaatgccggtggcggtagtttcaagagccagttcaagaaggccgacaagagcggtgcgcgttatgcgctgattctgggtgacgacgaactggcagggcgcgtggtaggttgcaagccgctgcgtgacgacagcgaacaacaaagcattgcctgggatgctctacccgagcgtctggctgcctgtctggcttgagcggactggcctgaattcagcgattgtaaggagtgacagtgtgacctcgggtaccgaagaagaacagctggcgcaaatcaaggagtggtggcagcgcaacggcaagcccttgctgttagggggcgcgcttgcgctggtggtggtgtttggctggcagttctggcagaagcatcagctcaaccaggcccagggggcctcggcgctgtatcagcaattgctcaacgtcgcgctggccgagagcggggctgatacggccgaagtctcacgattgggcaatctgttgcaaaaggagttttccggttcgcactacgctcagtacggcagtctcttcctggccaaggtagcggtggagacaggtcgcctcgacgaggctgcaacgaacctgcgcagtgtgctggatagccctgccgacaagacgctcgaagagctcgcccgccagcgtctggcgcgtgtactggcggcgcaggacaaggccgaagaggcgctggcgctgctgaaaggcgatgccgtgaaggcgtttgctgccagccgcgaagagctcagaggcgacctgctcgtccagctgaatcgcccggatgaagctcaggcggcctattccaaggcgaaagatttgctgtcgcaggatgccgcaatcggcggcctgcagttgaaactggacgacctggctcgtggagaggcgtgaactgatgcgttggaaaactgcagcactgctgaccctggccgtcctggctgctggttgtagcagcaatggcaagaaagaacctgagccggccgagctggtcaagttcgacgccgagattcagctgaaagaagagtggagccgctcgatcggcgacgggcaaggcgagacctataacctcctggctcccgtcgtgtacggcaacgagattttcgccgccgacgtcgacgggctcgtggtggccatggatcgcacgaccggcaaggtcaactggaagcaggatctggaagtgccgatctcgggcgcggttggcgccggctacgggctggttctggtcggcaccttgcgcggtgaagtgcttgcgctggatgtctcgaccggcgaagaacgctggcgcagccaggtcagcagcgaagtgctcgccgcgcctgccgtcaatggcgacgtggttgtggttcagacccaggacgatcgggtcatcgcgctcgaaatcgacaccggtgcccagcgctggagctacgaaagctcgcctgcggtgctgaccttgcgtggaaccggtgcgccgctgctgaccaatcagctggcggtagccggcctgtccagcggcaaggtggtggccctcgatacccgccgcggcctgccagtttgggagcagcgcgtcgccgttccccagggccgttcggagctcgagcgtgtcgtcgatatcgacggcgggctgctgctctccggtggcacgctttacgttgcgtccttccagggccgcgctgccgcactcgatctggagagcggacgaattctctggcagcgagatgcgtcgaccgcgaccggtgttgcgctgggctatggcagcgtatacgtcagccaggcggatggcaccgtgctgggcatcgacgagcgttcgaccactgtgctctggagtaacgactcgctgttgcgccgacagttgtcggcgccggcagtgttctctagctacgtggtggtgggcgacaaggaaggctatctgcatttcctcagccaggtcgacggccgtttcgtcgctcgtacccggatcgacagtgacggtgtccgtgcgcggccggtcgtcgaaggggactggctgtatgcctatggtaatggcggcaagctggtcgccctgaccattcgccaggcggactgacagctccattgacgcctgccgttccgccgaggcggagcgcttgatatacggccgctgccttgcagcggccttcgtgttttctgaaatatcgcagtggagagccgcatggttcccgtaatcgccctggtgggtcgccctaacgttggcaaatccaccctgttcaatcgtctgaccaagagccgtgacgctattgtcgcggagtacgccggtctgactcgtgatcgccagtatggcgaggccaagtggcaaggtcgcacctacattgtcattgataccgggggtttgaccggagacgaggaaggcatcgacgccaagatggctgagcagtcgctacaggcgatgcaggaagccgatgcggtgatgttcatggtcgatgcgcgtgccggcatgactccgggcgaccagatgatcgccgagcacctgcgcaagatgaacaagcgccacttcctcgtcgccaacaaggtcgacagcatcgacccggatatcgcacgagccgagttcagtccgctgggtcttggcgatgccttgccgatcgctgctgctcacggtcgtggcatcagccatatgctggagcaagcgctcggtgcctttcccaaggataacgccgaggcaaccgaagccgaaggcgaaggcgaaggtgaggccgaagagggcgaggtggtcgccgaggggcaggagctcaagcgcatccccgggccgagcgaaaaggacggcatcaagatcgccatcatcggccggcccaacgtcggcaagtcgaccctggtcaaccgcatgctcggcgaagagcgggtcatcgtctacgatcaggccggcacgactcgcgacagcatctatatcccgttcgagcggggcgacgagaaatataccctgatcgataccgctggcgtgcgtcgccgcggcaagatcttcgaggcggtggagaagttctccgtggtcaagacgctgcaggcgatccaggacgccaacgtggtgatcttcgtcatggatgcgcgcgaaggcgtggtcgagcatgacctcaacctgctcggcttcgtcctcgacagcggccgggccctggtgatcgcgctgaacaagtgggacggcatggagccgagcgagcgcgactacgtcaagaccgagcttgagcgccggctgttcttcgtcgaattcgccgacatccatttcatctccgccaagcacggtaccggcgtcggcaatctgtacaagtcggtgcaggcctcgttcacgtccgccgttacacgctggcccaccagccgtttgacgcagatcctcgaagacgccgtgcgcgagcatgcaccgccgatggtggccagccgccgcatcaagctgcgttacgctcacctgggcggcgccaacccgccgttgatcgtgattcacggcaaccaggtcgacgccattcccaagtcctacacgcgctatctggagaatacctaccggcgtgtgctgaagctggtgggtacgccgatccggattgagtacaagggcagcgaaaatccgttcgagggcaagaagaacaccctcactgaccgccaggtgaacaagaagcgcaggctcatgtcgcaccacaagaaggccgagaagaagcgtcgcgacaagaagcgctgattgcttcagccttcatcgagcgtctgatccatatccagcgccgggcgcgcatgcttcggcttgccggcctggcgtgccggatttcccaccaccgtggtgtggggcggcacgggttgcagcacgacgctgccggcgccgaccttggcgccctcgccgatttcgatattgccgagtattttcgcgcccgcgccgatcatcaccccactgcggaccttcgggtggcgatccccgctttccttgccggtcccacccaaagtcacgccctgcaggatcgagacgtcgtcgcccacctcggcggtttccccgatgacgatgcctgtcccgtggtcgagcatgatgccgctgcctatccggctggccgggttgatatcgatggccagccgttcgttgcagcgtgcctggatgaacagggccagcaagcgctctccgcgctgctgcaggtgatggccgactcggtaggcctgcagcgcaaggaagcccttcgagaacaggaaaacctccagcgccgtatcgaaagcagggtcgcggctgacgatcgcctgcaggtcacgccaagcctgttcggccagcgacgggtcctgacgatgggcgctggcgaaccgctcgagcagcgtttccggtcgctccgacgcgccggccagcaccttgctgatccgatgggccagcgcgcagccaaaatccggctgctggacgatggtctgtcgaaagagctcggcgagggttggttcggtctggatggcacggtcggcctggttgcgcagttcgtcccagcgggtgtcggtggcttgggtcggcataggggctccttcacgacgtcgaggcgcgagacctgtagagggctcgtttcggcatcactgtaacagccggtggtgcggcccaggccggctcgtattgagccgccgtgatcggctatcctgttttgccctgccgcagccccgtacggcaggcttgttggaaggcggccatgctcatcagtaaattgcccaacgtcggcaccaccattttcaccaccatgtcacagctggctacgcagaccggcgcgttgaacctgtcccagggctttcctgatttcgatgggcccgatgcgctgcgtgaagcggtcgcccgtcatgtcatggcaggccacaaccagtacgcaccgatgaccgggctaccggcgctgcgcgagcaggtcgctgccaaggtggcatcgctctatggtcgacaggtcgacgccgatgcggaagtcaccatcacgccgggcgcgacccaggcgattttctgtgcgatccatgccgtggttcgtccgggcgatgaggtgatcgtcttcgacccctgctatgacagttacgagcccgccgtggagctggctggcgggacctgcatccaccaggcgctgagccttccggatttcgtcatcgactggcagcggctggccgatgcgatcacgccgcgcacgcggatgatcgtcctgaacacaccgcataacccgagcggcgcgctgatcgacatggcggacctgcataggctggccgagctgatacgtgaccgggatatctacctgctcagcgatgaagtctatgaacatctggtgttcgacgggcgcgagcacgccagcgtgttgcgtcatgacgagctttatcagcgagccttcgttgtcagctcgttcggcaagacctatcacgtcaccggctggaagacgggttacgtggtcgctccggcggcgttgagcagcgagctgcgcaaggttcatcaatacgtcagcttcaccggcgttacgccgctgcaatgggcgctggccgacttcatggccgcgcatcccgaacacctcagcgaacttccgggtttctatcaggccaagcgcgacctgttctgcaatctgctggccggctcgcgtttcagtttcacccgcgcggcgggcacctatttccaattggcggactattcggcgattcgacccgatctcagcgatgttgcaatggccgagtggctgacccgcgagcatggagtggcgagcattccgatctcagtgttctatcagacgccgcctgaggaatcgcggctgatccgcttctgtttcgccaaacgagaggagacgctgcgccaggcagcggaacgactatgcgcgatctgaacaaccttcccgacctcgagttggcgctgatccagacctcgctcgtctggcaggacgccgcggccaaccgcgggcgattcgtcgatctgatggagcgcgctcgcggcgctgacctgatcgtcctgccggaaatgttcaccaccgcattctcaatgagctccgccgaactggccgagcccgaggaggggccgacctacgtatggatgcgcgagcaggcagcgcgcctggatgcggtggtgaccggtagcgtgatcatcgaggcggcagacggcagccatcgtaaccgtctgctctgggtgcggccgaacggcgagatttcccattacgacaagcgtcatctgtttcgcatggccggcgagcacaaacattacaccgcgggcgagcaacaggcgctgttcgaactcaatggctggcacgtacgtccgctgatctgctacgacctgcgtttcccggtctggagccgcgacccgcatgacaccgacctgctgctctacacggcgaactggcctgccgctcgccgtaacgcctggaaccgcctgctgccggcgcgagcgatcgagaacctgtgctacgtcgcagcggttaaccggatcggtgaggacggcaagggctatccctacagcggcgacagccaggtgctggactatcttggcgacccgctgctggaagctggcgacggcgacggtgtctttcgagcgacgttgcggggtcgagacctggccgcgtatcgcagcaagttcccggcctaccacgacggtgatgccttcgagctgacgctctagccgtgccggatagacgtagcgcgacggctagcgtaccgagtcggccttcgccaggcgggcgatctggcggtcctgcaggcctgccagcgcgatgacggagagcagggcgccgagcagggccatcagcatgtccgactgggtatcccaggggtcgccctgggtgccgaggaaatcctccgcaccctggccggccagcagcgccacccaccattcgatcagttcgtagaaggcgctgaatgccagggcgacgcaaatcgccaggaacccgagcatcttgcccggtacgacgaagccgcggcgcgacagtatttcccgggccagcaaggcaggcgtcacgccctggatgaaatgcccgagcttgtcgtatggattgcggctgagctcgaacaggtcctgtacccagaatcccggcggcacccgggcgtaggtataggcgccgccgaggatcagcaccagcgcatgcagcgcaatgatcacgtaaagcaggcgggtcagggcgaagcgctggtaggtccacagcaagagcggaaaggcgatcagcaccggtgcgacttccagcagccaggtggcccggtcgtagggcgcgatcccggatagggcgagcgccagaaggacgatcagcgccaagatgcagtggagggtcttgtcttgcatggtagagagccgttgcgtttgagatggcccagcatgcagcgttccgccgtcgacgtgcaatcgctgcaataacagcggtcagcgttgcgctgcacgtgcgcgcatcgttataccgggggggcatgtccgcgtttccgggcagagacacctccggtcggttggaagcgtgcgaggctggcagggcgttggcgggtcagctccttccggcgcgtttagcgggcgcacgagctaccgatctggcgcagcggccgagatccaccggcccgacgaacgcattggcgttgccctgcacgcaggcaacgctgcggttgcgccaacgctcccactcgctgaccggatactggcgattccagatgtcgtacagccgccgatcctgcttcgagaggcgcagaccatagcgctcgctcatgtacaggtaggtccgtgcgatggcgccccggctgtaatcggcgggcatggcggtgcgctgcttgaagttcaccacgaagggacatgcgccgtattgggtcggcttctcgctgagcatgccgaacccgtagttgctgcggtcgccattgacctcgccgaccaccgggacgaggttatgcagatcggcctcggccttgctgaacaccggatcgctcgaggtgcaatgcttgcgcccaccctgctgccagcattggcgctgatggccgatcacccaggccgggacgatgtgttcccattccacgcgcgcagcgcgtttgggctgcttgcgcgggacgtagccgcagctgcccaggtcgatccgtttgccctcgaagcggcagccgcagtagaaatcgactggccgttcggcatagatctgccaggccaaccgcttcgcttcgcggaaggtgcgtggggcatcggcatgagcggaggaggcgaaaagcaggacgagcagaaacaggctggtgcggcgcatggagatctcgacgacgaactgagaaaagcatccatgcggggcgtcgagatcttaccgatacgaagacaattattcacttgaaaaacaacgagttacgctgttttttcaagccgttcgtcggcccagtcgattgatttgcagcgaggcgaggatgatcagcccgccgagggtcaggcgcaacagatcggcatcggtatcccagaacagcagattgagaatcagcccgaccggcaccgccatgttattcatcaccgccaaggtgccggcgtcgaccagcgtggcgcccttgttccagcagaactgacccagcgccgtggccagcactcccatccacaccagcactccccactggctgggggtcgttggcagtttgtcgggattgccgaacagcaaccaggccggcaatacgatcaccagcgcgccgaggaagaagtagccgaagcggcgatgcagcggaatgtccgatgggtagcgtcgcgccagatgcttgtaaccgacttggccggcggcaaaggtgaagtttgccagctgcatcagcaggaaaccgccgaggaagtcagcggagacgccgtcgtagcgaatcaacccggcgccgagcaccgccacggccgcggccaccagcgcccagggattgaagcggcggttgagggcgtcgtcgatcagcgtgacgtgcagcggcgtcagcaccgtgaacagcagcacttcggccaccgtcagtacgttgaaactcagataaaggcagatataggtgacgccgaactgcagggcgccgaccagcgtgacgcctccgatgaagcccggcgccacgccgcgccagcgcgtcagtggcaagaacacgaggccggcgaggacgactcgcgtgagcacggcgaaatagctgtccacctggccggcgaggtaggcaccgatcaggttgaaggaataggcccaaagcagggtgacgaagaccaggtagcgcatgccggctcctcaacagaaggccggcgaccatagccgcttggatgcaaagaaggaaggcctgcccccacgcagcgcaggggcagtcgccaggtcaggcagtcttgagcgaggccatgtcgatgacgaaacggtacttcacgtcgctcttgagcatccgctcgtaggcgtcgttgatgtcttggatgtcgatcatctcgatgtccgagacgatgctgtgctcggcgcagaagtcgagcatctcctgggtctcgtcgatgccgccgatcagcgagccggcgatgcggcgacgcttgaagatcaggccgaacacgctgggcgaggggtgcggcgatgccggcgcgccgaccagggtcatggtcgcgtcacgcttgagcagcgcgacgaaggcatcgaggttgtgcggcgctgcgaccgtgttgaggatgaagtcgaagctgttcaggtgtgcggccatctcgtccgggttcttcgacaccaccacttcgctggcgccgaggcgcagcgcgtcttccttcttgtccggtgaggtggtgaacagcaccacgtgggcacccattgcgttggcgatcttcaccgccatgtggcccaggccaccgaggccgaccacgccgaccttctggccgggcccgaccttccactggcgcagcggcgaataagtggtaatcccggcgcacagtagcggcgcgacggcggccaggctggcttcgtcgtgcgagatgcgcaggacgaaatgctggtctaccacgatgttgtccgagtagccgcccagggtgttctcgccgccgccgaatgccgggccgttgtaggtgccggtgaagccgttctcacaatattgctccagcccttcgccgcaggacgggcaggtccggcagctgtcgaccaggcagccgacgccggcgatgtcgccgaccttgaagcggctgaccgcctcaccgacggcggtgacccgcccgacgatctcgtggccggggaccgaggggtagagcgtgttgttccattcgttgcgggcggtatgcagatcggagtggcagacaccacagtagaggatgtcgatcttcacgtcgttcggcccgacatcgcggcgggtgaaggaatagggaacgagcggcgtgctcggatcgtgggcggcataaccgatggcattgctcatggcggctcctgggctttggtctgacggaagagccaatcctagtgccgcagggcgcggagcggttgcacgattctgctggtgaatgatgcgttcctgcaggaacgggggagagcagccctggataacggctgctcgtgacgccggctggtaccgttgcgcccgcgtacgggcactgggcgccggtgtcgaggcgacggcgggcccattcaagctcgccgtgcgctcttagcggctcaagcggctttggaggtcgcttcgcgcagggcccggttcaaggcgctgaacagcgcacggatgctcgcggtggtgatgttctcgtcgataccgatgccgtgcagcggacgctcgccgtccagacgcacctcgatataggccgccgcgcgcgcattgctgccggcaccgatcgagtgctcgtggtagtccatgatctccagcttgaccggcaggccggcgaccagtgcctccagcgggcccttgccaatgccgcgccagtgcatgatctcgccctcgctggcgacctcgacgtcgaccgcgctggtgccgttttcttcctgcaagcggtggctcttcagcgtgtacggggcggtggcctgcaggtactcgctctcgagcaacgcatagatctgcttggcgctcatttcaaggccgaggcgatcggtttcgcgctgcaccacctggctgaactcgatctgcatgcggcgtggcaggctgatgccgtattcctgctcgagcagataggtgatgccgcccttgccggattggctgttgacgcggatcaccgcctcgtagctgcgaccgatgtcggccgggtcgatcggcaggtagggcacttcccacataccgttgggatcctgttggctgaaacccttgcggatcgcatcctggtgcgagccggagaaggcggtgtggaccaggtcgccgacataggggtggcgcgggtgcaccggcaactggttgcattcctcgaccaccttgcgcacggcgtcgatgtcggagaaatccagttgcggatcgacgccctgggtgtagaggttcagcgccacggtcaccaggtcgacgttgccggtgcgttcgccgttgccgaacaggcagccttcgacgcgatcggccccggccatcaggcccagctcggtggcggcgacgccggtgccacggtcgttgtgggtgtgcaggctgataagcacgctgtcacgtttgttgacatggcgcccgaagtactcgatctggtcggcgtagatgttcggtgtcgccgcttcgatcgtcgccggcaggttgaggatcagcttctgcgcaggcgtcggctggaatacctcgatcacggcgttgcagacctcgacggcgaagtcggtctcggtggagctgaacacctcgggcgaatactcgaagcgccagtcggtttcaggcgctgccgcggccaggcgcttgatgacctgcgccgcgctcacggcgatgttcaccacgccggccttgtcctggttgaagacgatgcggcggaagctcggcgcggtcgcgttgtagtagtggacgatggcccgcttggcgcccttgagcgattcgaaggtgcgggtgatgagatcctcgcgggcctgggtcagcacctggatggtcacgtcatccgggatatgaccgccttcgatcagctcgcggacgaaatcgaaatcggtctgcgacgccgaagggaagcccacttcgatctccttgagaccgatctgcaccagggtcttgaagaaacgcatcttcttgctcgcatccatcggctcgatcaacgactggttgccatcgcgcaaatccgagctcagccagatcggtgcctgggtgatggtcttcgacggccaggtgcgatccggaatgtcgatcgccggaaaggcgcgatatttcgtcgagggattcttgagcatggtcatggtgtttctccgtcggtggcgtgggcgagagagggccgctctcgcgtactgcagtcgttgatggtgcaaaactagtgcgttgccgggatgtattgcaagaagtgtttttagattggaataaatcactaattatcgatttttcgtgcaataaatctcgtaaaacggcttcgttgagggtgctcgcttgcccactgcgattgcggcctcatgtcgcatcgatggaaacggtggccgtgcgatcatccggccgctccgctggagcttgtgtttgaaacaaggaatgcagtcgtgacacgcaaagggctatcgacatcgagcatctggcttggcctgttcgccatgctgatgatccatgtcggccccttgtattccgcgctgcaggccggcgcagcgcaaacacctctcgccggcgaacctgtgcatatgcacgggcacctgggcgagcaggagcctgctgccgcaccggtccatcacggtgcaggcaaggcggagggtcccgcctggctgggcgcgttgaagttctgcggttattgcgaactgctgacgctcaatccgccgctgaccctctcgctggtcctggcactgccgctgctgcgtcccgtctttctccaggcgctgcctgccaagcctctgctcccggccaggcgccgcagcagcgggcatccccgcgcgccgccgtatctgcctgactaacgctccaactgccgctacgcagagagtgaaacggctgcgctcggtcaggctgcgttaaaaacaggctcgatgatttacagctcgtgatcgctgctttttcgcctgtttatcgcgggacgcctagtcctcgcctgatcttcgctcgctacgttttcacaccctgcactggcggccaaccagacaacgcagatttggaagacactcatgtccaggcacacttgctcggcgcgctcgcgcctgccctttaccttctcccttcgccctggctgccgacgctggcagctggcccatggcgccttgctgaccatgctggccggcactgccctggcggccgatcctgccgatccgcacgatcacgccgcgcataccgccgccgcgtacgagctggcgccgatggtcattaccggcgtcgcgcagcagtcgccgctgaccgtggtcaccgacccgaagatcccccgccagccgatgccggccagcgacggcgccgattatctgaagaccattccaggcttttccgcggtgcgtaacggcggggtgaacggcgacccggtatttcgcggcatgttcggctcgcgcctgaaactgctcagcaacggcggcgagatgctcggcgcctgccccaaccgcatggattcgcccagctcgtacatcagcccggacacctacgacaaactgaccgtgatcaaagggccgcagaccgtgctctggggtcccggcgcctcggccgccaccgtcctgttcgagcgtgagccggagcagttcagcgagcccgactaccgcctcaacggcagcctgctggcggcctcgaacggccgcttcgaccgcaacctcgatgccgccgccggcaacgcccagggttatgcgcggctgatggccaacagctcgcaggccgacgattacgccgatggcaacggcgatacggtgccgtcccgttatgacaagtggaacagtgacgtcgccctcggctggacgcccgatgacgacacgctgctggagctgacggtaggccgcggcgacggcgaggcgcgctatgccgggcgcggcatggacggcagccagttcaagcgcgagagcgccgccctgcggttcgagcggaccaacctcggcgaggtgctgcagaagatcgaggcgcgcatctactacaactacgccgaccacgtcatggacaacttcagcctgcgcaggccgtctggcaccggcatgatggccaaccccatggcagccaacgtcgaccggcgcaccctcggtggccggctggccgcgacctggcagtgggacgactacagcctggtgtccggggtcgatgcccagcgcaacgaacatcgccagcgcagctcccgctacgacatgatgaccggtacctacaccgcgcatgaccagttcgcctggaacaaggatgcggacttccataactacggcgtgttcggcgagctcacccgtacgctggacgatgacaatcgcgtgatcggcggcgcgcgcctggatcacgcgaccgcgcaggactatcgccgcaccggcccttcggctggcgacagccgcagcgacaacctgccgagcggcttcatgcgctacgaacacgacctgcaatcgcttcccgcgacggcctacgtgggcctcggccacgctgagcgtttccccgattactgggagctgttctccggcggcgccagcgccttctccaccgtgaaaccggaaaagaccacccagctcgacgtcggcctgcagtacagccagggcccgctcgatgcctgggcctcggcctatgtcggccaggtgcgggatttcatcctgttcagctacgggaccaacatgatgggcatgtcgagatccagtgccgacaacgtcgacgcgcgcatcatgggcggcgagctcggcgccacctaccgcctgaatgcgaactggaaaaccgacgccagcctggcctatgcctggggcaagaacagctcggatggcgaggcgctgccgcagatgccgccgctcgaagggcgcctgggcctgggttacgagcgcggcgactggagcgcggcgggcctgtggcggctggtcgcagcgcagacccgcgtagccgaagggaagggcaacgtggtcagcaaggacttcgatgagagtgcagggttcggggtgttctccctcaacggcgcctatcgcctgaaccgcaatctgaagctgagtaccggcatcgacaacctgctcgacaaggcctacagcgagcatctcaatcttgccggtaacgccgggtttggcttgtcagccgatgagcgcatcaacgagccgggccgcacctactgggcgcgcgtcgacctgagcttctgagcaaaggcgctggcaagcggagcagggtgcgtccccgctccggcttgcttgttccggacgctgtgcttcttcgctcggcgcctgcgattgcggccgctacgcccggctggcgtcgcgctccggagcggtcggctacgactcccgttcccgcatcgccggctcgccgcgctgccccagcgaggcgcaccagtcgcgcatgtcgccgccgctcgggtgctggaacacgcgcaggccaaactccggaagaatcgccagcaggtggtcgaagatgtccgactggatcgcctcgtattgcgtccaggccacggtgttggtgaagcagtagatctccagcggcaggccgtcggcagtcgggctgagctggcgcaccatcagggtcatgccctgatgaatcccgccgtgactgcgcagataacgttcaacgtaggcgcgaaaactgccgatattggtgatgcgccgggtgttgaccggctccttgccgcgctcttccagcttggcattccaggcgtcgatctcgcggcgcttctcggtgaggtattcgtccagcaggttgaagcggtgcaagcgctcgcattcctcaccgctcaaaaagtgcacgctctgctgatcgaggaacaggctgcgcttgatccgtcgcccaccgctttcctgcatgccccgccagttcttgaacgagtcgctgatgaagcgcttggtcgggatattggtgatggtcttgtcccagttctgcaccttcaccgtatgcagcgcgatgtcgatcacatcgccgtccgcgttgagctgcggcatctcgatccagtcgccgacgcggatgatgtcgttcgaggagatctgcacgctggccaccagcgagaggatggtgtcctggaagatcagcaaaagtaccgcggccatggcgccgaggcctgacagcaggattagcggcgagcggtcgatcagcgtggcgatgatgaggatggtggcgatcgcatacacgacgatcttgacgacttgcaggtagcccttgatcgggtgcacgtgcgcatcggctcggcgccgatagatcatgttgatgatgtccagcagcgcgccgagtgcgagggcgatggtcaacacgatgaaaccgccgcagacgttgcgtaccaccgtgacagccgcttccggcaggcccgggacggtattcacaccgatcgagagaatcagcgccggcacgatgttggacagccggcgaatgatgccgaaatcctgcagttccgtttcgcgcgaactgcgcaccaactggtaaacgccgcggacaaggatgcgtttgactatccagttggcgagccaggcggcgaatatcagcgccgcgctggccaccagggtctgcagctccgggtggtttctgagccagtccagccaaatgcccagttcgtcttgcatgaaagtgctccgccagatacctgttgctgcttggacgcgtcctagcgaatgaattcgcggctgatcgagcggaacaggtcggtcccggcctgttccatccactcgaacgcaaccatttccctggagacgatgctggcgccggcctgttgcatgcgggccaggccgagggccttgtcactggcacggcgcgagccgaccgcttcttcgaccacgaatacctgattgccgcgcgccagcagatcgagcacggtctgcaatacgcagatgtgcgtttcgatgccgctgacgatgaactgcttgcgctcaccaccggggcgcttgaacaactcaccgtcacgtgccgcggaaaaatgcagcttttccaggatcgactcgtcgtccatgccttcgcgcaatgcggcgatcgtcgggcccagccccttgctgtattgctcggtgagcaacacggggacgccgatgcgccgggccacctggatcagccaggcgctgtgctcggccagatcggtgtggttttcgatggcggggaacagccgttcctggatgtcgatgatgagaagggtcgattcctgcgcgttgatgagcatggcaattcccgggaggttgatcagggcttgaaggcaccgatgaagatggacggatcgacgcgtgcgtcgttgaggctgacgttccagtgcaggtgcgggccggtggcccggcctgtggagccgaccttgcccaacacggcgccacgggcgagctcgtcgccgaccttcacgtcgattttcgacaggtgacagaacatgctgatcagcccctggccgtggtcgacgaacaccgtgttgccgttgaagaagtaattgccggtcaggatgaccttgccggctgccggcgtcttgatcggcgtgccggccttggcggcgaagtccaggccggaatgcgggttgcgctcttcgccgttgaagaagcggcgcaggccgaacggcgaggacagcggaccgttgaccggcttatcgaacagcagattgctgggctggcgtgggctgaactggcggtaggcacgggtctgttcgtccagttcgcgctcgatgcgcttgaggtcggcagggttcggattgacctgccgctggtttttcagcgtgatgtgctgctcgcgataggtacgcggctcgacacgaaagccctgcgcccggccattgacgtccagcgactgctgaccggccttgaccgacagcggaatcccgacgatggcgatccagcgctggccgtcttcgcgcaccaccagcaccggtttgccgtcgtagcgggcgcttggcgcgctggcaccgtcgccgagatcgactaccgccacgcctccgggcaccggcttgttgagcagccgcgtgagaaacccttcggcgtgaacgggaagcgagaggcagagcagcagggcaaaggcaaagcgcatgggaatcctgagcagagtgggttagtccagcagtgacaaggtgaccggcgtctggtgattgtcttcgactcggacgtccagttcgccttcgcccaggcgcgccttcaaccgttggccggggtgagtctgggctgcgtgacgaatcgcctggccgcgctcatcgagcaggatgctgtagccacgtgacagcgtggcgagcgggctgaccacattgagtgtctgcgccagcgcctgcaattggtgccgatggcctttgagccgatcctgcatggcgcgcggcaggcgcgtggaaagatgctcgaggcgctggcgcagcaagttcaggttgcggcctggatgctgtccggacagtcgcgtctcgaggcgggcaagacgttcttgcccagcgcatagccgacggtcgatgccgcgcagcagccgttgctccagatcgtcgatgcgctgcgcctgctgttgcagccgttcgccgggatggcgcagacgccgcgtcaggctgtcgaggcgtgagctgtcccggtgcaggcggtcgcggatccgcagtagcaggcgctgacgcaggccgtcgaggcgctgtcgcatatcggcgctgctcggcgcgagcagttcggcggcggcggacggggtcggcgcccgcacgtcagcgacgaaatcggcgatggatacgtcggtttcgtgcccgacggcgcagacgatcggcgtctcgcagtcggctaccgcgcgcgcgacggcttcttcgttgaagcaccagagatcttccagcgagccgccgccgcgggccaggatcagtgcgtcgaaaccgccgcgatcggccagctgcagcgcacggacgatctgcgccgtcgcctcgcgaccttgtaccggtgtcggcaccagcgtcagggccacctgcggcgcgcgtcgacggaacaccgagatgatgtcgcgaatcaccgcgccggtcggcgagctgacgatgccgatgcgctgcggatgagcgggcagggggcgcttgccggcggcgtcgaacagaccctcggcgctgagcttgtctttcaaggcttcgaaggccaggcgcagggagccgtcgcccgccggttcgacgttgtcgaggatcagctggtagtcgccacgcccctcgaacaacgacacccgtccgcgtaccttcaccgccagtccgtcgcgcagcgcctggcgcacgcgcagggcgttctgccggaacagggcgcagcggacctgcgcgttcttgtccttgagggtgaaatagatgtggccggaggcgggcttggccaggttggatatctcgccttcgacccagacctgggcgaacacgtcttccagcaacagccgtgcacggttgttgagctggctgacggtcagcacttcacggtcgaggttcaggcgttgaaagggatcggtgagcatggcggcgatgataagggaaaagcgcgacaagagcgctgaaggttggaggctaaacggagaccaggcgacggaccagcattgacctcgttgcgaagcgcattaagctgcgccgctttcgtcgcctcctttcgagccagccatgagccacagtcaagcgatcgtcgtgccgcgtatctccacgtttcccggccatgaggccaaggcgcgcatgattttgcgctggttggccgagcgtcgtgtcgtcgaggcgttgcccactacctgcggccgtggcgttggcggcatggcatatgccatcggatcaggcgcgcgcagcgtcgtgctgcacccggagcggttgccgttcggtgagccgatcaatggactggagatggtgaccaagcgctgcatctacacgccgacccgcgatttcgccgaggaggcgggctgccccgagtgtcgacgcgagatcggcgaagcgctgttcgagagcctggacgagtggatgcccaggcagaccgataacttcacttgccccgaatgcggcttcgaggatgacgtcaacggtttcctgttcatcccggcctgcggcttttccaacctcggttttattttcaatggctggggcgaggctacctttaccccggcattcattgatgagttcgcggcgcgcctgggcttcaaggtggcggttgtggtcgccgagagtgactgatcggtcacttcttgctgccgacagcgcaaagcgcgcgacgggccgcacatccgcattgagcacgatggtgcgcgtgggtataatgccgcgcttcctttttcccgcctgggagcccccgccatgctgcgtatcagccaagaagccctgacattcgatgatgttctcctgatcccgggttattccgaggtcctgccgaaggatgtcagcctcaagacccgcctgacccgcgaaatcgagctgaacattcccctcgtttcagcagcaatggataccgtcaccgaagctcgcctggccattgccatggcgcaggaaggtggcatcggcatcatccacaagaacatgaatgtcgagcagcaggcggccgaggtgcgcaaggtcaagcgtcacgaaacagccatcgttcacgatccggccaccgtgacccccgaaaccaagatcagcgagctgctgcgcaaggcgcgcgagctgggcttctcgggctttcctgtggtatcgggcaaagaactggtgggtatcgtcaccgggcgcgacctgcgcttcacgccgaacgtcggtgattcggttgccgcgatcatgaccccgaaggaaaagctgatcaccgttcaggaaggcacggggctcgaggaaatcaaagccaagctgcatgagcatcgcatcgagaagatgctggtggtcgatggcaatttccatctgcgcggcctggtcactttccgcgacatcgaaaaagccaagacctatccgctggcgtccaaggacgaccagggtcgcctgcgtgtcggtgccgccgtcggtaccggcgctgacaccgccgagcgggtcgaggcgctggccgcagccggcgtcgacgtgatcgtcgtcgacaccgcccacggtcattcccgtggcgtgctcgatcgcgtgcgttgggtgaaggacaacttccctcaggtgcaggtgatcggcggcaacatcgccaccgccgaagctgcgctggatctggtcaaggccggcgctgacgcggtgaaagtcggcatcggcccgggttctatctgcaccacccgcatcgtcgccggtgtcggcgtgccgcaaatctccgccatcgccaacgtctccgccgccctcgaaggcaccggcgtgccgatgatcgccgacggcggtatccgcttctccggtgacctgtccaaggccatcgtggctggcgccaacgccgtaatgatgggctcgatgttcgccggtaccgaagaagcgccgggcgagatcgagctgttccagggtcgctcctacaaggcctaccgtggcatgggctcgctcggtgcgatgtcccaggcgcagggctcttcggatcgttacttccaggattcgtcggctggtgccgagaagctggtacccgaaggcatcgaaggacgcgtgccgtacaagggctcgctggccgcgatcattcatcagctgatgggtggcctgcgcgcctccatgggctacaccggcagcgccaccatcgatcacatgcggacccatccgcagttcgtgcgcatcactggcgccggcatggccgagtcccacgtacacgacgtgcagatcacgaaagaggccccgaattatcgggttggctgagccaactcgagcttcaagctacaggcggcaggctacaggcttgccgtcttgcttttgaggctcttgctcttacctgaagcctgcggcccgcggcctgcagcccttaagctggttttacgaggctcctcatggttcatcaagacattcacgcccaccgcatcctgattctcgatttcggctcgcagtacacccagctgatcgcccgtcgcgttcgcgagatcggcgtttactgcgaactgcacccgttcgacatgagcgaggaggacatccgtgtcttcaatccgcgcggcatcatcctggccggcggcccggagtcggtgcacgccgagggcagcccgcgcgcaccgcaggcggtgttcgatctgggcgttccgctgtttggcatctgctacggcatgcagaccatgtccgagcaactcggcggcaaggttcagggctcggacgagcgtgagttcggctacgcgcgcgtcgacctggtcggcaagtccaagctgttcgacggtatcgaagaccacatggacgacgacggcgtgttcggcctcgacgtctggatgagccacggcgacaaggttaccgatctgccggaaggcttccatatcctcgccagcaccccgagctgcgcaattgccgcgatgggtgacgatgatcgccgatactacggcgtgcagttccacccggaagtgactcacactcgccagggcgggcgcatcctgtcgcgcttcctgctggaaatctgtggctgcgaagccctgtggactccgtccaacatcgtcgacgatctggtcgagcaggtccgtaaccaggtgggttcggccaacgtattgctgggcctgtccggcggcgtggattcctcggtggtcgcggcgctgctgcacaaggccatcggtgatcagctgacctgtgtattcgtcgacaacggcctgttgcgcctgcacgaaggcgatcaggtgatggccatgttcgccgagaacatgggcgtcaaggtgatccgcgccgacgccgaagcgcaattcctcgagaacctggctggcgaagccgacccggaaaagaagcgcaagatcatcggccgcaccttcatcgacgtgttcgatgcgcaggccagcaagctcgacaacatccagttcctcgcccagggcaccatctacccggacgtcatcgagtccgctggcgccaagagcggcaaggcgcacgtgatcaagtcgcaccacaacgtcggtggcctgccggaggaaatgaacctcaagctggtcgagccgctgcgcgagctgttcaaggacgaggtccgcaagatcggcctggaactgggcctgccgtacgacatggtctaccgccatcccttcccgggaccggggctgggcgtgcgtatcctcggtgaagtgaagaaggaatacgccgacctgctgcgtcgtgccgatcacatcttcatccaggaactgcgcaacttcgactggtaccacaagaccagccaggctttcgtggtgttccagccggtcaagtccgtcggtgtggtcggcgatggccgccgctacgcctgggtcgtcgcgttgcgtgctgtggaaaccatcgacttcatgaccgctcgctgggcgcatctgccgtacgagctgctggaaaaggtctccaaccgcatcatcaacgagatcgaaggcatctcccgcgtcacctacgacgtgtcgagcaagccgccagcgacgatcgagtgggagtgaattaacgttctttggggactatcgtcagctatcgaagaactgacgtaacggattgatttggaaagagatacgtcacggcagcatcggtgactatcgccggccagcagagcaggtcggcggtagagctgacggtaagaaccggaggccggattaagccctctcgttcactcttcagaccaaagccgtctttgacggtacaaagtcttgtcaggaaagctggatttatgcggctttccgagcatcagccggtctcctggccgctgacggtacaagccgtcgatccggaggaaaatctcgatgctcaccgacactacactgcgcaatctagtcggcagcgagcgctacaaactccactgacatttctagccgtcaatccttccgagtttcgagcatgcgctgaagcaactcctgaaggagctgctgatctgacgcactgagccgttcgacgagcggtgccagtgcctgtttaccttgcacttgcagtcgcttgacgagttttgccccatcgctcgtcagaaaaacgtctgtcgctctcccgtcttcttcgttcggcgctcgtgccaccagtcccctcttttctgctcgggcgatcagccccgacatcgtttgcttctctagcccgaggtagtcggcgagttcagtcattcgcggtcgtcgatccgacaggattcccaagacgcggatcagcgagagcgacaagtcgttctcggcgccaatcctgttgattacggccatcgtgacaaaggaggtcgtcacaagtgcatcggccagcccttcgtcgggcgcggaggcttgcttcatgggtctttgctttttcatcgtggctgcatcttgacattgttcgtattacgcatcaatagtagatcgtattacgaactttattgagcctgtgttcgccaaaggagagcccgatgaaagccgctgtcatatcctcgttcgacctaccgccgcattacggccactacgccgatcccgcgccccaagggccgggagaaatgctcgtcgaagtgctcgcggccggcctgcatcacgtcactcgcggccaggcttcaggcgttcattactccagcagcggggggctgccgctcgtcccgggtatcgatggcgtcgggcgcggtagcgacggcaagttgcgctacttcgtgcaggggcccgggcaggtcggcacgatggctgacaggacggtgattgaactcgaccacagcatcgaacttccgctcgacagcgacgccgtcaccgttgccgccgcgatgaatccggcgatggcgtcctggctcgcgctgcgttgccgcgtgccgtttcagagcgggcagaaggtgctcgtcctcggtgccaccggaagctcgggaagcatggctgtgcagatcgcccggcacctgggcgcatcgcaggtcatcgccgcaggtcgcgatgaacagaaactctcgaagctgcccgcgcttggtgccacggaaatcgtgccgctgggggatgaccgattgggtgccctcgctcgcgaggtggatgtcgtgctcgatttcgtctggggggagagtgcggtgcgcgccatggagaccgtactcaagcaacgggcggatcgcagcttgccgatcacctggatacacatcggctcgatggcgggggaagtcgctgccattccgggcgccattttgcgttctgcgaatttccagatcgtgggcagcgggtacggctcggtgtcgggtcgcgagattctcatggagttgccagcgctggcgaaagagatcgtgcgtggcacgtttcgtatcgacgtgaaggccatgccactgcgaaatgtggagcaagcatgggccgaggcagcgcatgcgagcgagcgcatcgttctcacgccatgacgaaccgacagctgtcctccttcgtcgcgttctgcgggctgggcctgttgttggccgcctgcgccagtccgcagcatgtcacttcccaacgcaattccctgaccgcgcaagcggatcaggcacaagcctggttccgtttgtaccgcggtcttggcggtggctggaaccccgatccaagcctcgccgatcaattggccgctcaaccatgaaacgtcaccttgtctatctcttcgctgcggccgcttgtctctccgttgctgccaccgcgctgctcattatcacgcgcagcaccgcccaacccacctcgtcaccggcggcgctaccggcactgacagtcaagcgcatcgttgctggcgtgcagcaatggcctgagacgctgagcgccgtcggctccattgctgcctggcaggaagtcgtgatcggcgccgagatcggcgggcagcgtctgtcgaagctgctggtcgatgtcggcgatcaggtgaagcaggggcagctcctggcgcaactcagccccggcacgctcgaagccgagctgaacgccaatcgtgctgcgcttcaggaggccgaggtcaatgctgcggagatgggtcgcgcagccgaccgagcccggatgctgcagggcaccggggtcttgtccgcccaggccatcgaccaggccctggcagccggcgatgccgcgcaagcccgtctggccgcagcccgtgcacgcgtgcaggccgacatgctgcgattgaactacacccaggtgcgcgcgccggacgacggtgtgatcagcgcccgggccgccgtggaaggcgcgctcatccaggcgggtgcggagatcatgcgcctgcaacgccaggggcggcttgaatggcgtgccgaattgccgggtccggaacttgcgcgtgtggcccccggccaggccgtagtcatcaaactgggcggcacgcaggccattgaaggccgtgtgcgcatgatctcgccgcaggtcgatccgcagagccgtaccggcatcgtgtacgtggacctccagcccgctgctgcggtgcgcgccggcttgtttgcccgtggcgagcttctattggatcagcacagggtgctgacgctgcccgagaccgcggtcttgctgcgcgacggtttcagctatgtcttccgcatcgaggggaacaaggtgcggcagcagaaggtgacgctaggcgtgcggcgcggtgaccgggtcgcgatccgcgaagggctggccgccgacacggcggtcgtcgagtccggcgtcggcttcctggcggacggcgtgacggtgcgcgtcgccgacacccgttcgaatacgtcccccaagatccatacgcgctgaagggggcgacgatgaatttctccgcttggtcgatccgcaaccccgtgccggtcatcctgcttttcatgatgctcacggcggcaggcctgatcgccttcaacgccgccaaggtgcagaacttcccggacgtcgacctgcccatgatcaccgtcatggccagtctgccgggcactgctccggcccagatggaaaccgaggtcgcgcgcaagctcgagaacgctatggccacgatgaaggggctcaggcacctgcacacgacggtgcaggacggcgtggccacggtctcggcggagttccgcctggaaaagccgccgcaggaagccctggacgacacccgcgccgtcgtagcccgggtgcgggcggacctgcctgccgccttgcgcgaccccgtcatcagcaagctcgagttcaagaatgatccgatcctgacctatacggtggcgtcgccgcggctggacgacgaagcactgtcgtggttcgtcgatgaccagatcacccggcgcctgctcgccgtgcccggcgtcggttccgtcacccgcgtgggcggtgtgaaccgcgaagtgcgcgtggaactcgacccggatcggctactggcattgcgcctgagcgcagccgatgtctcgcgccagctcggccagatacaacgtgaggccccgggcggacgaacccggctgggcgatgccgaacagactgtgcgcatggtcgtcagtgcaccttcggccgccgccctggctgccattgaaatcccgctgcccgacaggcatgtcgtgcgcctggatcaggtagccaccgtgatcgatgcgctggccgagcgacgcagtggcgccttcctcaacggcaagccggtggtcggcttcgagatcctgcgtaccacggacgccagtgacctcgacgttgccagcggcgtgcgccaggcgctcgccgcactggagacggaacaacctggtatcgaaattaccgaggcgttcaacgccgtcgatcaggtggtggagaattttgaaggcagcatgtcgctgctcatcgaaggcgccttgctcgcggtgctggtggtgtggctcttcctgcgcgacatccgcgcgacgttcgtcgccgccgtagcgctgccgctgtccatcatccccaccttcctgttcatgcaatggatggggttcacgctgaacatcatcaccttgctgtccctgtcgctggtggtcgggattctggtggacgacgccatcgtcgaaatcgagaacatcatgcgccacctcgcgcagggcaaggagccgctggtggctgcccgcgaggcagccgacgagatcgggctggcggtgattgccaccaccttcgcgctgatcgccgtcttcctgcccaccgccttcatgaaaggtctggttggcaagttcttcgtgcagttcggctggacggcatccctcgccgtgttcttctcactcgtcgtggctcgcctgctcacgcccatgatggcggcctatctgctgaagaagccgagccggctccatgctgaccccttctggatgccggcctatctgaaggctgcccgctgggcgtttacacataagggcgcgacgctgacgatcctggcggtcttcggcatcgccagttgcatgccgctggttgctggcgcgatcaagggcgacttcatgccaccggaagacctgagccggacacggatcagcgtcgagttgccgccgggcagcaccttcgaacaaacgcgcgccatcgccgagcaggcgcgcgccgccgtgacagcgcatccgcatgtgacgatggtctacacggccattggtggtggcagcgtcggagacaactcaatggacggcgtagccgaagcgcgcatggcgaacctgacgctgaacctgacgccacgcaaggagcgcccgggcctgagccagcaggacatcgagcgcgagctgcgcactcgactacaggacgtggctggcgcacgggtcaaggtggccgcatatgttgcctacacgttggtgctttccggcgaggacagtgcattgctggcgcaacatgcggccacggtggagcaggaactgcgcagcctggcagggatcggtcaggtgagcagcagctcaagcctgcagcggcccgagttgatcgtgcgcccggacacggcccgtgcggccgacctgggggtgaccaccgacgcgattgccgagacggtgcgtgtcgcgactctgggcgactacgaccagtttctgccgaagctcaacctgagtcagcgccaggtgccgatcgtggttcgactgcccgaagcctcgacgcgggacctcgaactgctgcgtcagctcacggtgcctggcgcacgcggcccggtgtcgctgcgtgacgtagcggaggtggagatggccagcggccccgcgcagatcaatcgcctcgaccgtctgcgcaacgtgaaattcgagatcgaactcaacgggcaagcgttgggcgatgtgcagcagcgcgccgctgcgctgtccagcctgtcccatctgccgcctggcttggtcaagaacgacatcggcgaagcagaaacgtccaacgaactcggccggagtttcctgctggcgatggggacgggcgtggcctgcatctacatcgtgctggtgctgttgtttcacgcatgggtgcagccggtaacgattctcggcgcgctgctgttgtcgatcccgggagcgatcctggcgctgttcgtgaccggcaccaacctcagcatgcccgccatgattgggatgatcatgttgatgggcatcgccaccaagaactccatcctgctggtggagtacgccatcgtggcgcagcgcgatcacggcatgccccggctcgacgcgctgctcgacgcctgccacaagcgcgcacgtcccatcgtgatgacgaccgtggccatgggcgccgggatgctgcccattgccctgggcttcggcgccgacccgagctttcgcgcaccgatggccattgtcgtgatcggcggcctcattacctcaacctttctgagcctgttcgtgatccctgtgctctacgaagtactggatgacctcgttcaacgctttacgccgaggcgttggatggcgcgatggggaggggcttgaatggagctgcgccagcgtcgctgtgtcgtcgcggacgcagagggactgcacttctccagcaaaagatttatgtctatgacggtaaaagcgacggtaacggccatgtcgatagcagccaatacctttgattacatagggcaggcgacccgttgatgatcgaataggtgctcatctcagctgctgcaaaaaaagagccccggcaatcccggggctttttgttatgaattgctcagtggaaagccgtcgggacgtcgatgcgccgccagatcgcttcggagaagctgtagagagcgaaggccaccagcccgaggccgaccagcgatagccagaaggtgccaaagggcagcgtctgcagggcgttcaaggcatcttcaaggcctggcggatcggttggctcgtagcgggcgccgccggtgaagagcatgcctgccaccacgaagaatgcgacgccgcgagcgatcaggcctgcccgcgatatcggccgcacccagcgcatgacgtgttcggaggcgttgaagtacttttcgaacttggctttccagcccttgatgacgtgtgcgatgccgacgccgagcggcaccagcgcaatgaggtagaccaggtagttggaatgcttccagccgagcagacccgagaggaagtcctggccaccagagccgccgctgcttccggcatcgcctagcgggctgccgagcaggcccagcgtgaatagcgtgagcagggcataggcgatggcgctgccgaccaggccggcccggatggccagccccttggcgtcggtgccgtgtccttccgggtcggcgattgcctgagtcaggcgccatgctgcataggccacgagccctatcaccatgatccagagcaaagcctcaccaaacggctggcccaacagctgctgaatggcgcctttggtgccgactgttttcccgccgccggttccggccagaaaggcgaaagcgccgatgatcaggtagaccacgcctcgagcggcgtacccgctgcgggcgagccagactatgcccttgctgatgctgacgtcatcttttgcgcgggctgcggtggtgtgcatagagcgtcctcggtgtatgtaaagttgttcagtagacgtgcagttgcggacaagggttcgaaacatccggcagcatctgtccgatcggcgacggtggcgacaaaagagcgagcccaaacgggtggccgagcaggcagtagcgcccggcgccgcctacgggcggccgggagaccgaatcaaaggtgcgacgatccgggtgagcgcgcctgcccgctggcactcctctgcttattcggactacggctcagccgttcgggttaatgccgactccgtctaatgctcgcggctgcgcgtcgtaagctttgaggagagcgttcccgctcgcgaggagaggatcatgaacacctataccgattggcgtctgcgcggccccggtgtggacctgtgcaattgcaactttggctgcccctgccagttcaacgccccgccaacggacggcaagtgcgaggcggcggtcggcttccatatcgtcgaggggcatttcggcgagacctcgctgaatgatcttcacgtcgcctgtactttcgcctggccgggcgcgattcatgaaggtcacgggcaatgccaggccttcatcgacgagcgcgccagcgagcctcagcgtcaggcgctgctgaccattctcagcggccaggagcaagagccgacggctttcttcgcgatctttgccagtacggtgtcgaccatgcacgagccgcagttcgtgccggtcgaggtactgacggaccggagctcactgaccgccagcatccgcgtacccggtttgatcgacggcaaagctacgccaatccttaatccgatggacggatcgctgcatcgggcgagagtcgtgctgccggagggcttcgagtttggcgaggccgattgtgccagcgccgagttcaagacctcgggcgccatcgcgctggactatgccggtagcaacgccatgctctacgacctgcacatgggacccaatggcatcattcgcggctagtcgcatcgaccggggggcggcaaccgccgccggcggcgtgctcggattcggcgcgctggcctggtattggtcggcgcgtgaggcttcgctgatggcggccatgggcgaaatgcagatgccgccgaccgactggctttccccgcaggggctggtcgtgctgggcatgtggctgatgatgatgcaggcaatgatgttgccagcggccctgccgatgattctggtctatcgccgctgcttgctcagggatccgcagcgcacggtcaggctctggctgttctgcgcagcctatgctctcgtatggtccggttttgcggtgttgctcaccggctcgcagatgcttggtgaatatgccggagtgctcgaccctatgcgcctgcagcttccaccggcgctgggcggtctggttctgctgatggcaggcgtatatcaactgagcagggccaaggccgcctgtcttcggcattgtcaaaatccattgagcttcctccagcatcaggcgcgccccgggttgctcggatcctggcggaccggcgtgcaccatgccctttattgcctgggctgctgctgggcactgatgcttgtgctgctggtggcaggggcgatgaacctatgggcgatggcgctgctaagcctgctggtgctggcggaaaaactgctgccgctgggcaggctctggcgtcgctgcagcagtgcggtgctaatcgcagcagggctgctgatgttgcttttcgcgagcgtctgagcgtcgcgcaaccggtcggcgcagaaggcattctccgaactgcggccatcggactcggattcgggcatcgcagcggtcgcacaatcccaagcgttaatgagaaactgtgtcgtcttcaacgcaagggattccgggcatcatgtcgtttagccgtaggcagatactcaccgggctggtcgggttgggcgtcgttggtgcaggcgtgggaggcgtacgctactggctcgggcgtcccgccgatgcagccacccatgattacgaactgatcgcagcgcctgccgatgtcgagctgatcccaggtacccggacgcccgcctggtgttacggtgggcaggctccgggtcgggagctgcgtgcccgtcagggcgactggcttcgggtgcgcttcaccaatcatctgccggagccgaccacgatccactggcacggcatccgcctgccgttgaacatggacggtgtcccctacgtctcgcagttgccggtgctaccgggcgagtcgttcgaataccgcttccaggtgcctgacgcaggcagcttctggtatcacccgcataccagcagcgccgaacagcttggccgtggcctggtcggaccgttgatcgtcgaggaacgtgagccgagcggcttccgccatgagcggacgctaagcctcaaaagctggcacgtcgacaagcaaggcgcattcaccgcgttcagcgtaccgcgcgaggccgctcgcggcggcactccaggcgtgctttccagcgtcaacggcgagcatgcgccgactctggagttgcctgcgggacaggtggtgcgtctgcgggttctcaatctggacaacaccctgacgtaccgattgaacctgccgggcggcgaggcgcgtatctatgcgatcgacggcaatccggtggcgcctcggccgctcggcaaaaattattggctaggaccgggcatgcgcatcgacctggcgctgaaagtccctccggcgggtgaggagctttcgctgcgcaacgggccgctgcggctggccagcttacggtcggtgagtagccgcgaggtggcgggcgactggccggcgccgctgccgaccaatccgatcgccgagccggacctgcagcgcgccgagactctgcgcttcaacttcgaatgggccggcacgctgtcgagcgacgcggggcagggcgaagcgttcacgttctggcaggtgaatggccaggcctgggacatcaacgacaagacctgtgcggatcggcccatcgcgacgctgaagaagaacgggcattacatcttcgagctgcgcaacctcagccaataccaacatcccattcatctgcacggcatgaccttcaaggtgatcgcatccaaccgcaagcggatcgatccctggttcaccgatacctacctgctgggcaagaacgaaacggccagaatcgcccttgtcgcggataatcccggtgtgtggatgttccactgccatgtgatcgatcacatggagaccgggctgatggcggcgatcgaagtggtatgaatcagagcaagcaagcgtcgagcggacgcatcggaagggtggtggcgtgtatgaggcgggtttccgtatgaaacggccggtgatcgttgaccgctcccgcgatgatgatttcatgcgcgaggcgctgatgctggccgcagaaggcgcccggctgggggaggtgccggtgggggctgtcgtggtgcagggcggcgagatcgtcggtcggggattcaattgtccgatatcccgccacgaccccagcgcccatgccgagatggtggcgatccgcgacgccgcgctgtggctgcagaactaccgtctgccaggcagcacgctgtacgtgacactggaaccctgcagcatgtgtgcgggcctgatcgtgcactcgcgtatccagcgggtggtctacggcgcgacggagcccaaggccggcgtggcgatcagtcgtgggcagttcttttcccaaccatttctcaaccaccgtgtgctggtcgagggcggcgtcatggcgcaagcctgcagcgagatgctgagtgagttcttccgctctcgccggggcaagggtggtgggggcgagccgcaggggccggtcgagggttaaacgcgaccggtccgacgatcaaacgctgctatagcgccgcacgcccgcttccggcagtttttcatgggccgcgatactgccttgtgcaggaaacaccaccagatggtcagcggcgatggcaatgccgacgtcctgtccggtcggatagtctgcatggctcggaaagatgccttcgagctgattgccggtcggcagctgcaagcggtacagggtcgcggcgccgaggaaggtcttgccgacgatcagcgccttgagcgggctctgtggcgagtagacgatgtcatccgggcgcaacaggacatccacggagctgccggctggcatcgtgtaggcgcgattgccacgaatgacgccgagttcggtctgcaccgtttccggatcgatcagctggccgcgaatgaaatagccttggccgatgaaggacgccacgaatggcgtcaacggctcatggtagaggttgtagggcgtatcccactgttccagtcggccatctctgaacacgccaacctgatcgctgacggcgaaggcttcctcttggtcgtgcgtgaccagaatggcgctggtgccccgggccttgagaatctcgcggacctcatggctgagccgccgccgcaagtcgccgtcgagattggagaaaggttcgtcgagcagcagtaattcgggttcgggagcgagcgctcgcgcgagcgcgacgcgctgctgctggccgccggacagttcatgcggataccgttgggccagtggcgagagatgcaccagatcgagcatctcttgcacgatgcgctggcaatggggctgcttgcggatgccgaactcgatgttctccgccacggtcaggtgcgggaagagtgcgtaatcctggaacaccatgccgatccggcgtttctccggcgccagcgtgaagccacgccgcgagagcacgacgtcacccagctggatttcaccttcgttgacgtgttcgaagccggcaatggcccgtagcgtggtggtcttgccgcagccggacggccccagcaggcagccgatatcgccgcgattgagatgcaggttgaggttctgcaccacgctctggccgccataaccgcagtccagattgcgcagatgcagaagcggttgatggttcatgcgtggtggtaggccggctcgaccagaaactcaagcagggctttctgtacatgcaggcgattttcggcctgctgccaggcgaccgagcgcttgtcgtcgagcaggtcctcgctgatttcctcgccgcggtgggccggcaggcaatgcatgaacagtacgtcttctgcggcgaggtcgagcagggcacgatcgacctgatagcgtcggaacgtggccatccgcgcagccatctcgtcttcctggcccatcgaagcccagacgtcggtgctgactaggtgggcgccgctgacggcttcgcgcggatcacgtaccacacgtacccggtcaccggcttttgccagcagctcgctgtcgggctcgtagccttcagggcaggcgacacgcagctggaaatcgaactgaatcgcggcctctatataggagttgcacatgttgttgccatccccgatccaggcgaccgtcttgcctgcgatcgtgccgcgcagctcgtggaaggtctgcatgtcggccatcagctggcagggatgcagatcgtccgacaggccgttgatgaccggcaccgaggaattggcagcgaactccctgagcgtggcatgagcgaaggtgcggatcatgacggcgtcgagcatgctcgacatcacgatggctgaatcggcaatcggctcaccgcgaccgagttgcgtgtcgcgtggcgacagaaagatggcctggccgccgagctgaatcatcccggcttcgaacgacagccgtgtccgtgtcgaggctttctcgaagatcatgcccagcacacggttcttcagcggctcgaacagaatgccgcgctcgcgcagatccttcagctcgatgccgcgacggaccagggcgagtagctcctggggcgtgcaatccatcagtgagagaaaatgccttgcgctcatatcgattacctttattgccgcaatcgaggcctgaggttttttcgagaaaaaaggagggcctacgacaggggtcgcgccagaagcgacgaaacgggaaaggcgcgatcttatccagaaagtcttcgtgggcgcaaatccggcctcagcaccgcgcaagtgcgcttattcagggggttcgcgtcggtatcaggtaagaaaagcctagccctgcactcggctttacagggtcattcctgtacaatgcgcgccaaccgtgactagccgaggtgccccatggatatcatcgaaaccatcaaagagcagatcgagaagaatccggtcctgctgtacatgaaaggctcgcccaacgcgccgcagtgcggcttctccgcccgcgcgacgcaggcgttgatgggctgcggcgagaagttcgcctacgtcgacatcctgcaaaaccccgaaatccgcgccaacctgcccaagtacgccaactggcctactttcccgcaactgtgggtaaacggagagctggtcggcggtagcgacatcatcctggagatgttcgagaagggtgagctgcagccgctggtcaaggaagccgcgcagaaagccggcgcctgatcgcgattagttgactgaaacccgccgaacggcgggtttttttatgccttctcgccccgggctccgcggcgcggtgagggctgcaaatgcgcaccggactgtgtagatgccgaaacgaaaacgggagccgacggctcccgtttgtaaggcatgcagacggttaatcgtccatctgggactgcaggtagttctccatgccgaccttgtcgatcaggctcagctgggtttccagccagtcgatgtgctcttcttcggactcgagaatgtcttccaacaattcccggcttccatagtcgcctacgctctcgcagtaggcgatggccactttgagatcctggacgccgccctgttcgagcttgaggtcgcagtcgagcatttcgcgcgtattctcgccgatcaacagcttgccgaggtcctgcaggttcggcaggccttcgagaaacaggatgcgcttgatcagcttgtcggcgtgcttcatctcatcgatggattcgtcgtattcatgcttgccgagcttgccgagaccccagtcttcgtacatgcgtgcatgcagaaagtactggttgatggcgaccagctcattgccgaggatcttgttgaggtgctgaatgactagcttgtcgcctttcatgtcggtgtcctgcgtcgaatcaatgcatgtgatgcaagcagtctggccatgaaccccagggctgtcaaacctaagtccttgaatgcaaaagggtaaaactgaataagaatacgtctgttccgcgactaaaaagcaaggcgttgatttacggacagaaaaaagccgggcatcgcccggctttggaaaaagctgtgtctatcaggcgggaacgaagctggcagggtaggccagggaagcctgagcactctgcacattgctcagcgtctcacgaaccacttgcttggcaacgcaggcgcatttaccgcactggctggcaacaccggtggcttcgcgcacttcacggtagctacagcagccttcgtaaatggcttcacggatctggccgtcggtaacaccctggcaaagacacacgtacatatgaactacccgttgggtctgtgatgggtgagatgctaaacagaatgagaatgattgtcaaagttcattcgtcgggagctcgcggtcgctttcacgctgcgtggtgcggcaagcgagccgcagcctgcgtcgtctagtggctgtttcggccggatgaatagcccggccgcatgatgcgttaaactgcgttcccttttccgcgcctggagccgtcatggccctgcaagccacgccttacaaagtcgaaatcaacctcaccgatctcgatcgccacgtttatcaggatctgcgcttcaccgttgcccggcatccgtcggaaaccgaagagcgtctcgccgcccggttgatcgcctatgtgctctggtacagcgagcaactggcgttcggccgtgggctgtcggatgtcgatgagccggctttgtgggaaaaaagcctggacgatcgcgtgctgcactggatcgaagtgggccagccagatgccgaacggatcacttggtgttcccggcgtgcagagcgattcagtctggtcgcctacggcaacttgcgcgtctggcagaccaaggtgctcgacactgtgcgtagcctgaagaaaatcaatgtggtggcggttgggcaggaggcgctggaggaggtagctcaggatctgccacgggcaatcagctggagcgtcatgatcagcgagggttcgctgttcatcaccgacgagcgcggccagcacgaggtgcctctggagtggttgatcggcgagcgcggttgacgcacccgccattcagtcatgaggggcgtaaccgccatcttcaggattgccagaactgcacaaaggcgttgaacgacatcaccacgccgaccgccgtagccgccatggccagcaggccgaacaccatcatccaggtgggatggcggtactcgcttccaacaatgcctggcttcttcgcggcccagaggatgcaggccagcgccagaggcagtaccagcgcattgagcgtgccagccacgaccagcactttcaccggttggcctaccaggccgtagatcaaggtcgaacaggcgatgaacgcgataaccatgcgctggttgtggcgctgaatgctctcgtgcagggaatacataaaggtaacgctggtgtacgcagcgccgattaccgatgaaaccgaggccgccagcagcacaatgccgaacatcttgtagccgatcgtgcccatggagtgggagaacaccgaagccgctggattacctgcatccagcgccatcccctggctgaccactccaagtgcggcgaggaacaggcagatgcgcaccacgcccgtcgtcgcgataccggtcaccgcggcgcgcgtcaccacgccgacgttctcgacgcccgtgatacctgcttcgaccaggcgatgcccgccggaaaaggagatgtagccgccgacggtgccgccaaccagggtcacgatgggcaacagcaggaccagcgggtcgtccgggttgatgctgcggctcagcgcttccattaccggcgggctcgactgcagcatggcgtagccgatcatgcacagcatcaccaggccgagcacctgcatcaccgagtccatgacgcccttggcgttgcgcagtagaaagatgctgatgatcaacactgccgcgatcagcgaaccgagcaccggcggcacgccgaaaatcacattcatcgccaggccagcgccgccaatgttgccgatgttgaaggcgatcccgccgagcacgatgaatgccgagatcaaatggccgattccgggcagcacccggttcgccacatcctggccgcgcagattggcgacggtgatgattcgccagatgttgagctgcgcgccgatatcgatgagcaacgagatgacaatggcgaacgcgaaactcgccaggtatttctcggtgaacagcgaagtctgggtcagaaaggcggggccgatggatgaggtcgccatgatgaaaatggcgccacgcaggacgttgcgttgcgacgcgggggtagcgctagcggtggggtgcattgggataccttttttgttgatgttggggcaggtagaaatgcatccgggcggacccggtatcgttgttttgttgttgtgtgcggtatcggtggtacgtcagttcgcctcttttggttgatgcatcggttgcccgcattcatgccaggcgccaggcgccaggcgccaggtcctgggctcggcggctgcggcgctacagcccgatgccgccgcagcgtctgggttcgctcatcgccatctggcaagcagttgccgttgctctcgctgcgcggcggccagcgcgatcggcttcagatggatccgggtgcctggcatgcactgagccagacgcgccacggccagcggggtaagcgctccgaggcgcggataaccgccgatggtctgccggtcgttcagcaaaacgattggctggccatctggcgggacctgaatcgctcccaagggaacgccttcggaaatcatcgattgcctgacgctacgcagggtggggccaagcaggcgtacacccatgcggtcggcacgctggtcgatggtccagggcttgttgaacgcatcgaacaggctctggccactgaaatcgccaatctgggcgcccagcaccaccgccaatgcatcggggttagccagcgatagcgtctgggtggggtccaaggtgcgcggttcgggcgctgtgccattccagctcagtcgatcgtccggagcgagcggacggccatctccgtgcagaccgcccagcgcctcgcgacgtaccgtggcgcaactgccgagcagctgcggcgccgtgaacccgccgggcgcggcgagataggcgcgtacgccctgacgcggttgagcgaagtcgaggcgttggcccctgcgaatgtggaagcttcgccccggtgcgacgggctgaccgtccagcgtggcgccaaggtctgcaccgcataacgccaggcagctgtcggactcggcgagcagaacgagattgccgagagtgatttccacggtggcagcctttagcgggttgcccagcagccagttggcccaggcctgggacacccagtcagcggcgccaccctgggtcacgcccaggtggcgcacaccgaatcggccgctgtcctgcaagctggccagcgcgccgctgcgttcgatcagcaggctcatggcgtcacctcgaaagggctgtcgtcgccaccgaggcgaacgaattcggcatgctcgatgggctggaaacgcacccgatcaccgggttgccagatgctgtagccatcgaggttgcggtcgaacagccgagtcgggctgcgaccgatcagattccaaccgccaggcgagaccagcggatagattgccgtctgccgatcggcgatgcccaggctgccggccggcacttgtttgcgcggggtctgcaggcgagggctggcaaggacttcatcgaccaatcccatgaaggcgaagcccggcgcgaaacccagcgcgaatacctggtacgtccgggcgctatgccgctcgatcactcctgcgataccgagaccgctgcgttggccgatggcctcgagttccggtccgacgctggggtcgtaccacaccggaatgtccagctcgcgtgcctggccacctgcgtccggctcaagttcatgcagggcttcggcgatgcgttggcgggcctggctgtcgtccagttgtgtcaggtcgtaatgcaccagcagcgtcgtgtaagagggcacaagatcaatcagcgccgcaccgaaggcgtcgcgcagacggctggctgcggccaacagccagggcatatgggcttcgtcgatctcatcgaacaggcgcagcatcaggcagtcgatgccgaccacttcgatacgcggcgtcatgctggaaggcgctcgagcgcctggcgaatgcgttgcaccgcggcgaccgatccagcgttgtcgccgtgtacacacagggtgtcggcgcgcagccgcaaggcgctgccatcgctggcggtcagcgcgtcgcccctggccaggcttatcgcctgggcgaccacggtttcagcgtcgtggtggacggcaccggggagggcgcgggacaccagcattccagccgcgtcataggcgcggtcggcgaacacctcgaaccacagcgttacgcccagttcgtcagccaaggcttgcgcgccactgttgtcgcgagtggacatcagcatcaagggaagcgacggcgagtaggcgatgacggctttcatcaccgcgcgcagcagctcgggcttgcgcatcatgtcgttgtagagcgcaccgtgcggtttgacgtagcgcacctgcgtaccctcggcccggcagatgccgtccagcgcgccgatctggtagagcaatatgttctccacttcatccgggctgcaggccatggagcggcggccgaagccgaccaggtcgggataggccgggtgcgcgccgaccgttacgtcatgctcggccgccagcgccacggtacggcgcatggtctgggggtccgatgcatgaaaaccgcaagccacgttggcgcaatcgatgaaaggcatgacttcggcgtccaggcccatggtccaggcgccgaagctttcgccgatgtcgcagttgagaagtagacgtttcataccaatcctcacgggcaactggcccgcacggcgcgccggcgggtagatgaatactacgatgataaattatcgataatttatcaataaatttttatcgttggtctgttccgaggtcgtttccggccgtattgctgtatgcttgccgccccgaatcatccgggcggcaccacgcttcgccccctcaggtcatggtccacaagatggttgacgccaaacccccccgtccgttgcgatcgcccatcgtcgcgtcggcgcatctcgccgaacagtcgcaggaactctcggagctggagtacggaatcatcgtcgccagcgccgccctgatgcgctggatggagcgctgcatgaaggcgtccggcgcggtggagatgaacgcgctcgatgtcatggtgctgcacaatctgaccagccgaggcagggccaagcgacaggcggacatctgcctgctgctcaatatcgaagacactcacaccgtgacctacgcgctgaagaagctcggcaagctcggcctggtggaaggtgaaaagcagggcaaggaaatgttctaccggaccaccgacaagggccgtgaactgtgccaggaatatgccgatattcgtcgtgagtgcctgatcgcctccttcgagaacctcaacgtcgaccccgacgagattcaccgtctcgccgggctgctgcgcgccatgtcgggtctctacgaccaggcggcgcgcgctgctacctcgctctgatcgacttcacgctgtacgccggattattcatagatgcgcatcgaaccccgtcctcttcccgaacagctccccgacctgggcgacctgccgccgctgttgacgcgtctgtacgcggctcgcggtgtgcaatcggtcagtgagctggacaagggcctggcgcgcctgattccgtacggccaactcaaggggatcgacggcgcggtgtcgctgctggtcgaggcaatcgagaacggcaagcgcatccttttcgtcggtgacttcgatgccgacggcgcgactgccagcaccgtgggcgtgctgggcttgcgtcaactgggcgcggcgcacgtggattatctggtgcccaatcgcttcgagtatggctacggcctgacgcctgagatcgtcgccgttgccctcgaccgccagccagatctgctggtgaccgtggacaatggcatctccagcgtcgacggcgtggcggcggccaaggcagccgggctcaaggtgctggtgactgaccatcacctgccaggcccggaattgcccgcggccgacgccatcgtcaatcccaatcagcccgagtgcgcctttccgagcaagtgcatcgccggtgtcggggtaatcttctatgtgttgctggccttgcgcgccgcgctgcgtgacagcggctggttcgcccgtcagggctggtccgaaccgaacctggccgagctgctcgacctggtcgcgctgggcagcgtcgccgacgtggtgccgctggacgccaacaatcgcatcctcgtgcatcagggcctggcgcggatacgtgccggtcgtgcgcggcctgggctgcgggcgattctggaggtggccgggcgcgaccatcgccgtatcacctcgaccgatctcggcttcatcctcggcccgcgactgaacgcggcggggcggctcgacgacatggccctgggcatcgaatgcctgctctgcgaagacgaagcgctggcgcgggacatggctgtgcagctcgaccagctcaatcaggaccgcaagggcatcgagcagggcatgcagcgcgaggcgctggcgcaattgaaggacctgccgctcgaggacatgccgttcggcctctgcctgttcgacccggactggcaccagggcgtgatcggcatcctcgcttcgcggctcaaggaacgctatcaccgcccgaccatcgcctttgccgatgccggcgatggtctcttgaagggctcggcgcgctcggtgccgggctttcacatccgcgatgcgctggatgcagtggcggcgcgccatcccggcctgatcagcaagttcggcggccacgcgatggcggcgggactgtcgctgccggaagcgaacttcggcgccttcgcagcggccttcgacgccgaggtgcggcgccagttgtgcgaagacgacctgaccgggcggttgctgaccgacggtcagctgagcatcgaggaattccacctggagctggccaaggcgctgcgcaatgccgggccttgggggcagcacttccccgagccggttttccatggagtcttccagctggtgcaacagcggctggtgggcgagaagcacctgaaaatggtgctcaagagtgaatgcggctcgctgaccctcgatggcattgccttcaatatcgatcgcgacctctggcccaaccccaacgtgcgttgggccgatctggcctacaagctggatgtcaacgaattccgcgggcgcgagagcgtgcagttgttggtcgcgcatatcgccgcgcgttaggaagtccatcccttagcccatgccgggcgccccaactctatcgggagaggggctgaacgaagtcaccgcatcatcgacgtggttcgttgccgacgggcgagagccgcacaccctcgacaggggcgagcccggccagtctttctctccaaagaggagaggggtcgaaagaagcaatcgcatcacccggcgctgctattccgagccgatggatggggtcacatacacacctcgccatcgccggactcggtcagtgctcttccctctggggagaaggctagggtgaggggcggcggttggcacaccgaaatggtctgaaggccacctccgtacgatcggtcggctgaatcgagcgctatttgccacgtcgtgcatgattggcgcgcgcccggctccgacctaaagtgatccgattacaacaacaatcccccggagcctgcgatgagcgaaacgacccggcatcaccgcgcctgccacctgtgcgaagccatttgtggcctgaccatcgaaacccgcgatgagcagatcgtttccattaagggcgacccggaagacagcttcagccgcggccatatctgccccaaggcggtcgcgctacaggacatccagaacgacccggaccgcctgcgccatcccatgcgccgggtcggcagtgagtggcaggccatcgagtgggacgaagcctttgcgctggtagccggtcgtctggccgaaattcgcgagcgtcacggcaacaacgcggtcgcggtctaccaaggcaaccccagcgtgcacaactacgggttgatgacgcacagcaactacttcctcggtcagctgaaaacccgcaaccgcttctccgcgacttcggtcgaccaactaccgcaccatctgaccagcctgatgatgtacggccatggtctgctgattccgatcccggacatcgatcacaccgacttcatgctgatcctgggcggcaatccgttagcctccaatggcagcatcatgaccgtcccagacgtggagaagcgtttgaaggcgctgcaggcgcgcggcggcaagctggtggtggtcgacccgcgccgcagcgagacggccgcgattgctgatcagcacctgttcgtccgccctggagaggatgctgcgttgctcttcgggctgctccatacgctgttcgccgaaggcctgacccgcaccagccacttgccggtggatggtctggatgagttgcgcaccgcagtggcgccgttctcggctgatgcgatgagcctgcgctgtggggtgcctgccgaacagattcgccagctggcgcgcgatttcgctgcggcggaaaaagcggtctgctacggacgcatgggtgtgtccacccaggccttcggtacgctgtgccagtggctggtgcagtcgatcaatctggttaccggcaatctggaccgcgtaggcggtgcactctgcacggagccggcggtggatctggtggcgaatacctcaggcggccacttcaatcgctggcagagccgggtgtccggcttgccggaatatggcggcgagctgcccgtctcggcgctggccgaggagatgctgactgaaggcgagggtcagattcgtgcactcatcaccgttgcgggtaatccggtgctgtcgacgcccaatggccgccagctggaacaggccctggacgggctcgatttcatgctcagcgtggatttctacatcaatgaaaccacgcgctacgccgacctgatcctgccgccaaccgcgccgctggagcatgaccactacgacaccacgttcaatctgtttgccgtacgcaacgtcacccgcttcaacgaggcggtgctgcccaagccaaccggcgcgctgcatgactgggaaatcttcgtcggtctggcccgggccttcgcggcgcgcactggcggcgacctcaagccgaccgttgcccctgagcagatgatcgacatggggctacgcgctggaccctatggcgacaggagcgaactggccctgagcctggcaaggctgcgtgacttcccgcatgggctcgacctgggggcgctcaaacccaaccttgccggccggctgaagaccgtaaacctgcgtgtccaggccgcgccatcgctgtttctgcaggatgtgcagcgctttgcttcggccgccgctgcgcaaacggatcaactgctgctgatcggccgtcgtcacgtgcgcagcaacaactcgtggatgcacaactatcaccgactggttaagggcaagccgcggcatcagcttttgatgaacccgctcgacctgtcgcggctcgggttgctcgatggccagcgcgtgcgggttcgctcgcgggtcggcttgatcgaggtggaagtggcggccagcgaagagatgatgcctggcgtggtcagcctgccgcacggctggggccacgggcgtcccggcgctcagctggagatcgctaaccgccagccaggggcgagtgccaacgacctgacggatgagcgccagctcgatgcgctgtccggtaatgcagcgctcaacggcgtgccggtttgggtggaggcggcgtaggggcgatgcaacaatcaggctgccagagtccattacggtacggcactgcccggcctgtgggagcggtcttgaccgcgaagaatgcgtaggcggctgaatgtttgctgctcgctgaaatagccgctattaacggctctgttttcttccgaaaccggctaagcctcgtgcagtcctcttcgcggtcaagaccgctcccacgaaagcttggcgtttagcctgatggccagttgtgcacgggccgaaaagcccgccaaccctgcaatcgcatgggtatggaaccgcccgacctgtgggagcggtcttgaccgcgaaaaggcgagcaagcggctgaatgtttgctgctcgccgaaatggctgctattaacggctcttcgtccgtgatcggctaagcctcgtgcagtcttcttcgcggtcaagaccgctcccacgaaaagctgggcgtttagcctgaaggctgggttgtgcacgggccgaaaagcccgtcggccctgcaatcgcatgggtatggca

SEQ ID NO: 22 - DNA, 194253 bp, Pseudomonas sp.
ccgccccctcaccccagccctctccccagaggggcgagggggttgggtcgtgcaccgcctgggtcgcgatgccggtccgcggcgacgctggtgctatgccatcagatcggaaaggtcatcgcgcctaccgcagcgatggcaacgatgctcgtccggccacgtcaatcaggcgagcgaccgactaccagaccacaccatttcttcgcctcactccgtcatcccctcgcccctctggggagagggttagggtgaggggaaacgacctcaaggccacgcaggagccacaacaatgatcactaccctcctggtcgccaaccgcggtgagattgcttgccgcgtgatgcgtaccgccaaggccatgggcctgaccaccgttgccgtgcacagcgcgatcgaccgtgacgcccgccacgcccgcgaggccgatattcgtatcgacctcggcggcgccaagccggccgagagctatctgcggatcgacaagctgatcgccgccgccagggccagcggcgcccaggcgatccacccgggctatggcttcctctcagagaacgccgacttcgcccgcgccatcgaggatgccggcctgatcttcctcggcccgcccgcctcggccatcgacgccatgggcagtaaatccgccgccaaggcgctgatggaaaaagccggcgtgccgctggtgcccgggtaccacggcgaagcgcaggacgtggagaccttccgcgtcgctgccgagaggatcggctacccggtcctgctcaaagccaccgccggtggtggcggcaagggcatgaaggtggtcgagcgcgaagcagacctcgccgaggcgctgcaatcggcccagcgcgaggcgcagtcgtcgttcggtgactcgcgcatgcttgtcgaaaaatacgtgctcaaaccacgccacgtggagatccaggtgtttgccgatcagcacggcaactgcctgtacctcaatgaacgagactgttcgattcagcgccggcatcagaaggtcgtcgaggaagcgccggcgccggggctcacccccgagctgcgccgcgccatgggcgaggcggcggtgaaggcggcgcaagccatcggctacgtcggcgccggcacggtcgagttcctgctcgacgcgcgcggcgaattcttcttcatggagatgaacacccggctgcaggtcgagcacccggtgaccgaggccattaccggtctggacctggtcgcctggcagatccgcgtcgcccggggcgagccgctgccgatcactcaagagcaggtgccgctcatcggtcatgccatcgaagtgcgactgtatgccgaggacccggacaacgacttcctcccggcaaccgggacgttggacctgtaccgcgaatccaccgcttgccccggccgtcgcgtcgacagtggcgtggccgaaggcgacaccgtgtcccccttctacgacccgatgctcggcaagctgatcgcctggggcgagaaccgcgaggaagcgcgcctgcgcctgctggcgatgctggaggaaacctgcgtcggcggcgtgcgcaccaatctggcgtttctgcgccgcgtcatcggccatcccgccttcgccgcggccgagctggacaccgggttcattccccgtcacgaagccgaactgatgcgtacacccggcgagctgggcgatgcgttctggcaactggcgggcgagctttacgtacaaaccgaacccgccagggtccgcaatgacgacgcccattcgccctgggcacggcgcgacggcctgcgtttcggcatgccggcgcggaccggcgtgcatctgcaatgcaacggggaaaaccggctggtgcgcatcgatgcggccagcgcaacccagcctgccaccacgggtcaggcgatgcgtcggccaaaggcgattcgcaagggcgagaccctttaccttgaatggaacggagaattgcaggcggtgacggccctcgaccccatcgccgcagtcgaagccagccaccagcaccacggcgggctgaccgccccaatgaacggcagcatcgtgcgggtactggtcgagcccgggcaaagcgtcgaagccggtgccacactggttgtgctcgaggccatgaaaatggaacacagcatccgcgcgcaacaggccggcgtggtcaaaggcctgttctgcgccgaaggcgagatggtcaacgaaggcacggtgctgctggagatggaagaggcttgacgatggccagggtcggacagggttcgccgttttccaccctgcgcacgaacgcaaacgccgcaggcttttccaccgcagccgatgcggcctcggatgacacaacgaaaccggtgagcccgcacaatcgcactcacctcctggaggacatatgagcctgcccaaacaggtccgtctggtcgaagtcggaccgcgcgacggcctgcagaacgagaagcagccgatcagcgtggcggataaagtgcgcctggtcgatgaccttaccgcggccggacttcgctacatcgaagtcggcagcttcgtctcacccaagtgggtgccgcagatggcagggtcggccgaggtgttcgcgcagatccggcagaagccgggcgtgacctacgcggcgctgacgccgaatctcaagggccttgaagcggccatcgaagccggcgtcagcgaggtcgcggtgttcggtgccgcctccgaagccttctcgcagaagaacatcaactgctccatcgaggagagcctggcacgcttcgcgccgctgatggcggccgcgcgcgagcatggcatccaggtgcgcggctatgtgtcctgcgtgctgggctgcccgtacgaaggggaaatcgacccgaagcgcgtcgcccatgtcgcccgcgagctgttcgccatgggctgctacgaggtctccctgggcgacaccatcggcaccgggacgccgggcaagacccgccagctgatcgaagcggtcagccgcgaggtgccgcgcgacaagctggccgggcattttcacgacacctatggccaggcgctggcgaacatctacgcaagcctgcaggaaggcctttgcaccttcgacagttcggtggccgggctcggtggttgcccctacgccaagggtgccagcggcaacgtcgccagtgaagacgtgctctatatgctgaacggcctgggtatcgacaccggcgttgacctcgatgggctgatcgccgccgggcaacgcatcagtgatgtgctcgatcggcccaacgggtcacgcgtcgcccgggctcgcagtggcagctgacgccatatttcggtgggaggcgcgccctcgcggcgatgcggatcgcaggtccgcctgctgaagaaaagcttcggcccgaggtcgggcctcccacaaaagtggcacctgtgtcattcggcgccaggtcagaacaacaacagaggtctatatgaacaagatctatcccaacgccaagcaggcgctcgacggcctggtcgaggacggcatgaccctcgccgtcggcggcttcggcctgtgcggcattcccgaggcgctgatcgaggcgctgcgcgacaccggcaggaagagcctcacggtcatcagcaacaacgccggcgtggacggcttcggccttggcctgctgctcgagtcgcgccaggtgcgcaagatgatttcctcctacgtcggcgagaacaaggagttcgagcgccagtacctggcgggcgagctggaactcgaattcacaccccaaggcacgctggccgagaagctgcgcgcgggcggctccggcattcctgcgttcttcacccgcaccggctacggcaccttgatcgccgagggtaaggaaacccgtcagttcaacggcgagtggtacgtgatggaagagtcactgaccgccgacatcgcgctggtcaaggcgtacaaagccgacaaggcgggcaatctggtgttcaacaagaccgcgcgcaacttcaacccgctggccgccatggccggcaaggtctgcgtggtggaggtcgatcatctggtggaaaccggcgagctggacgccgaccagatccacctgccggggatctacgtgcagcgcatcatccacaacccgaacgccgagaagcgcatcgaaaaacgtacggtgaggagctgatcatggcctggacacgtgaacagatggcgcagcgcgccgcgcaagagttgcaggacggtttctacgtcaatctcggtatcgggctgccgaccctcgtcgccaactacattcccgaaggcatggacgtctggctgcaaagcgagaacggcctgctcggtatcggccccttccccaccgatgacgaggtcgacccggacctgatcaacgccggcaagcagaccgtcacggccctgcccggcagcgccttcttcgacaacgccatgagcttcggcatgatccgcggcggccacatcaacctggcgatcctcggcgccatgcaggtgtccgagaaaggcgacctggccaactggatgatcccgggcaagatggtcaagggcatgggcggcgcgatggatctggtggcgggcgtcaagcgcgtcgtggtgctgatggagcacaccgccaagggcgcgcacaagatcatcaagcagtgtgatttgccgctcaccggcgtcggtgtggtggaccgcatcatcaccgacctcggcgtgctggatgtcaccgagcaggggctgaaactggtcgagctggctgatggcgtaagcttcgagcagatccaggaagcgactggctgcacgattcgacgctgaagcacgacgctggccagaagccactgggcatcgggccagcgcagcgtgtagccttggaccgaagcaacatcgcagcagtggcgaaacgcgcccggctcgtcgcgagccgcgggtggacaggcaagactggatattttcatggcaaagcagacttacagcatttccgatttggccaacgagctcgacatcaccacccgagcgatccgcttctatgaagagcaaggcatgctctcgccgacccggcgcggccaggagcgaatctacagccccaaggatcgcgtagcgctaaagctgatcctgcgcggcaagcgcatcggcttttcccttgccgagtgcaaaacgctgatcgaactctatgaccccaaggccggcaaccagaagcagctgaacatcatgctcggcatgatcgccgagcgccgtcagcagctcgaacagcaattgctcgacattcagcagatgcagttggagctggacaccgccgaggaacgctgcctgaccgcgctgaaagcgaccgtggacaaggcggccagctgaagccgcgagcggcagcggcgcaatccgcctgctttccgcggatcgtaaacgctggtgggctgaagcagaacgccgcccggcctacgcaacgagacgtttcggcagcgcgcgcgcggaaacgatccaggccccaacggatgttggctgcaagcaccttccgtaggatgggcgtagcccaccgccgggcctctaccaatccacaacgtcactgaagcggaacgccgcgtcctgtttgttcgccatgcagcggctaacgacgccgggacgttccgtcagcgcgcaccgatatccagcaggtaggccaccagcgtacgcgtacaggcctgcatcgcatccccggtgatcagctcgtagccatgggtgttttcggtcggcatcgccaggcatccggcacgcggcgatgacccggagccgagcactgcgcttgcatcggaggcgaatcccggcatgagcgcgggttgcggtgtatagccacagcgaagggcagccgccagcaaatcgtccgaaatcgccttggtgtacaaccctttcttgtcgccggtgaggatgatcggatcggcgcacagccgagtcccgtactcctcggcgatgggccccacttccaacgcgatgcaaacgtcacccggcagggttctcgccgcgtactgggcgcccgagttggtctcttcctcattggtggtcaggacgatatacacatcctgcttgagatcgcttttgcgctgagcgagctgttcggccgcgcgcaatgcagcgactaccggcgcacggtcgtcgagaaaatgcgcagcgatggcatcgttcacccgaaacggccgtcgccagtgctggctcagcaccacacgcgagccgggccgaacgcccatctcgaccagctcagactgggtccgacgggtaatcacatggacatcggcccactgcacgttgccactgagaatatgcgccgactggggcgattccaaggtgccgtgcatcgtgccgaacgacaaaacgccgggcagtacatccgtctcgcccatcacatcgaccgggcacatgccgaagttgaccgggaatgccccacccaacgcgaccacatgcaggcggccgtcgtccgcgatgcgcttcacgaccatggcgatctcgtcctgatgcgccatgacacgaatggcccgcgactgggcggtttcgcgtgacacgccggcagcccggatcactcccaccagattgtcggcagcatccatccatacctcatcgcagctcgcttcgagctcgcggcgacacaccgcccgcacctcttcctcctgaccgcctggcccacgcgccagcaatagagactcgagcaacgcaaagtccgcctcgatcgacatgcatcctcctgttcggattggtatcaccagttgtgaccgcagcatgaacggagcgtgctaccaccggcgataccactaagcagaggtgctctggaaaccgatgcccaggcttcgccccgcgacgaagctgcccacatgtctggaaacaaggacacatttccatatttctggacaatcacctcctcgccttcgccctatgtccattcttctggataaccgatcacctatccgcggcctgaaaccctctagaacggggcttacagcagcgttacgaacccaggcacaaaaactgctaggtaatacccgcaacgcgccagaccaccggaacgagaacgctgcggcggctcgttccgcgtcccggctagaccgggctgcataccaaaacaacaaaaaaggaatctgtaatgtcgatcaccaagaagctttcccgcctcgcctgcgccatcggcaccaccgcactgctcagcgcgacactggtaagcgccaatgccaccgccgccgaaaagatccgctggcaggtaccgctggccttcccgtcgcacctgatcggcctgaccactcccatcaagcacctgtccgaatcgctcaaggccatttcgggcggcgacatccagctgcgctactacgagcccggcgagctggtgccgccgttcgaaatcatggatgcggtcagcaatggaaagtatccggccggctacacctggatcggctacgaccagggcaccattccggccctgccgctgtattcgggcgcgcccttcaacatggaaccgccggcgtacctcgcctggtactacgagggcgacggcaagaagctgctcgaggaaatctacgccgaacgcaacatccacccgatgctgtgcagcatcatcggcccggaaggcgccggctggttcgccaaaccggtcgagaagctggaagacttcgacggcctgcgcatccgctttgccggcattggcggcaaggtgctggaaaagctcggcgcttcggtcaccatgattccgggcggcgagatctaccaggcgctggagcgcaagaccatcgacgccaccgagttctcccagccggcgatcgacaagatgctgggcctggaccagatcatcaagaactacatcatgccgggctggcatcagacgctgaccacctcgcacctgctggtcaacaagggcgtctgggacaagctggagccgcaaagccgcgcgctgatcgagatgggttgcgaatcggcgacgctcaaaggcttcgccgaaagcgagtgggcgcagccgaccgccttgcgtgactacgagaagcagggcgtgaaggcgcaggttttgccggagccggtgctgcgtgaactggagcgcgtgaccaacgaagtgctggacgaaatcgccgccaaggatgagatgttcaaccgcgtcctgaccagccagcgcgacttcatgaagcatcattccatctggcacagcaaaggctacctgccgcgcgatttctacaagtacgactgaccgcagcgtcaagccggtgcccctgggcgggtctctcccagggttcgaatgatcggacaggatgcgcagcggcggtttcgctgcgcttgcccgcccacacgagcccgccccgccgtccggagcaccggccgcacgatcaggccgtgcatgtttcccaatttcggatctccgaggtggccgtgtccgctcatcccgtttcccctaacgaagcagtgcctgccgccgaagcggatgcactgccgcacaatcgattgtcctactggctggacaaggccctggtcgcgatcggcgaagccagcgcctggatatggctgctggtactggctgtggtgctgaccaacgtgttcagccgcttcgtgctttcgcgcggctccatcgccctggaagaactgtcctggcacctgttcggcgccgccctgatgctcgccctggcctacggggtcgtgcgcgacgatcacgtacgcgtcgatgtgctgcgagagaagttcagcctgcgcagccaggccgtcatcgagctcctggcaatcgtcttcctggccttgccagtggtggtgatgatggtcgatgcgctggtgcccttcgcctaccaggccttcatatacgacgagcgctcccaggcacccagtggcctgccgcaccgcttcatcttcaagagtgtgttgccgctcggcctgacgctgttggcgctggccctgctgtcacgcgccagtcgttgcagcacgctgttgttcaatttcccgcgggtcttcacggccccgacgcatgaccgcgaccgcggccattcgcagccctgatggagtagccgtaatcatgggtctggaacaaattctcgtcatcagcatgttcgccaccttcatggggctgttgctgctcggcttcccggtggcctggtcgctggccggcatcggactgctgttcgccgtgttcggccatgtactggtcgaatatttcaacgccgatctctggttcacctgggacggcaccatcggcgtgctggatgcgcgcatctacggcatcgtcgccaacgaactgatggtcgcgctgccgctgttcatcttcatgggcatcatgctcgaccgctccggcatcgccgagcggctgatgcacagcctggtgcgggtacttggtccgctgcgcggcggctacgcagtgaccgtggtgctggtgggcatcctgctcgcggcctccaccggcatcgtcggcgcttcggtggcgctgctcggcatgctctccgttggccccatgctgcaagccaagtacaacaagagcctggccgtcggcaccgcctgttcggtcggcaccctgggcatcctgattccgccgagcatcatgctggtgttgatggccgaccgcctgggtacgtccgaggcctcggtgggcaagctgttcatgggcgcgttgatccccggcatgttgctggcattgatgtacatcctctatatcgtcgtggtgtcctggctgaagaaggacttcgcccccgcgccggccaaccgctcgaagctcgacggacgtgcgctgctcgatgtgttctgggccgtggtgccgcccttcgtactgatcctcgcggtgcttggctcgatcttcttcggcatcgccactactaccgaagcctcggcggtcggcgccgttggcgcggtgatcatggccgcctgcagccgcaagctgaacctcgcggttctcaaggaagcgctgtaccagaccagccgcacctcggcgttcatcttcggcatcttcatcggcgccacggtattcgccgccgtgctgcgcggcctgggaggtgatgacgtgatccgttcggcgctgaccggcttgcccttcggccagaccggcgtgctgctgaccgtgctgttcattacctttctgctggggttcttcctggactgggtggagatcacgcttatcatcctgccgctggtcgcgccggtgctgttctccatgggcgtcgatccgctgtggttcgcgattctcttcgcgctctgcctgcagacctccttcctgaccccgccggtgggcttcgcgctgttctacatcaagggcgtctgcccgccggaagtgaccacgcgcgacgtttacctgggcgtgttgccctacatcctgattcaactgctggggctggcgctggtgttcttcttcgcgccgctggcgacttggctgccgaatgaggtgtatgcccagtaagaaacccgccaggccgtgtggaaactaccgcgctcggttatgcagcgttaaaaacaggctcggaatgctcatttacagctcgtaaactccgcttcctcgcctttttttgccttgcctaaccatcgctcgctacgttttcacacggcctgctcacaggccctgcttcagcctttgcgcggcgtaccggctgccttgctccaagcagccggcgcctcccataatcgggcgatttcaacatgactgagcttttccatggcaattgcacgcaacgacctcgaccatgacggcttggtgatcggcgtctcgcccgagcgttttcgcgccgtggcgatgccgctgctgttcgaccacctcaacgcgcagtgcgaaggcaccatcgcggtcaatcgacaggcgcgcatcgtctggatcaacgacaagtacgccgagaagatcggcatcagcgacccccgcggcgtactcggcaaggaggtcgaggaagtgctgccggccagccgcctgcgcgaagtggtcgacagcggcctgccgagcatgctcgacctcatggcgttcggcgacgagcacttcgtggtaacgcgtattccactgcgtgacgaggacggcaccctcgtcggtgccctgggcttcgtgctgttcgaccgtgcgcagcacctcaagccactgatgtccaagttcaacatcctgcagacccagctggtcgccacccagaacgagctggccaaggcccgccgggcgcgctacaccatcgcaggcttcatcggcaccagcccggccgccagcgaagtgaagcgtcaggcccggcgcgccgcgcagctggacgccaccgtgctgatccgcggcgaaaccggcaccggcaaggagctcctggcccagggcatccacaacctgtcgccgcgcgccaatggccccttcgttgcagtcaacgtggcggcgattccggaaaccctggtcgaagccgagctcttcggcacagccccaggcgcctttaccggcgccgatcgcaaggcgcgcatcggcaagttcgaagtggccaatggcggcaccctgttcctcgacgagatcggcgacctacccctggccttgcaggccaagctgttgcgggtgttgcaggagcaggaaatcgagccgctgggctccaaccaagtcaaaccgctcaatgtacgggtcatcgccgccacgcatatcgacctggaagccaaggtcgctgccggcgagtttcgcgacgacctctactaccggctcaacgtgctggcattgcaggtcccgccgctgcgcgagcgcgccgccgacattccggccgtgatcgagcacctgctcgacgacatcgccaaccgctccggccaggcaccgatggagctggcgccgagcgcgattgcattgctgtgcagccagccatggcggggcaatgttcgcgagctgggcaacctgcttgaacgagcgcagctgagcgcagatggaacgccattggaggcgcggcatttcctgccactgctgggtacgcagaacgtcgccccaccacaggccgccattccgctgcctgacccggccttcgcagagcccgcagcgcaaggcgacgcgccgttgcagcgcttggccgagagcatcgcccaggccgagcgccgcgccttgcaaaccgccctgctcgcttgcaaaggcaaccgccgccgtgctgcaaccgagctgggcatctcccgcgccagtttgtattccaagctgcaactgcacgggctgagcgagcgataacgcgcccgctgcgaaaggtcttgtggctcgcgcagccggtggcagcgctcgagcctctccgtccgccttatcgctggcaatttcaacgctgcgccccggagcgagccgaagcgtaaccccgcttcgcccaccccgcgctccgtcgctactgcgccagccagccgccgtcgacgttccaggcaacgccacggacctgacgcgcggcatcgctgcacaggaacaccgccagttcgcccagctgttccggcgtgacgaaatccagcgacggttgcttttccatcagcagttcacgggtcgcgcggatcgggtcgccgtgagcctgggccttgctgtcgatctgctgctgcaccagcggcgtcagcacccagccgggacagagcgcattgcaggtcacacccgtggtggcggtttccagcgcaacggtcttggtcaggcccaccaggccatgcttggccgccacataggcggctttctgcgccgaggccaccaagccatggaccgaggcgacattgatgattcgcccccagttgcgctcacgcatcccgggcagggccaggcgcatggtgtggaacgcagaggaaagattgatcgcgatgatgctgtcccagcgctcgaccggaaaggtctcgatcggcgccacgtgctggatgccggcgttgttgaccaacacatcgaccgcgccgaactcgcgctcggtctggccgaccagatcggcgatctgatccgcatcggacacgtctgccgggtgatgcatcacccgcgtgccgtgtgccgagacgcgctcgagcgcggcgtccacatcgccgaatccattgagcatcacattggcgccggcctcggccagcttgcaggcgatacccaggccgatgccactggtcgagccggtgatcaatgcggtcttgcctttgagaatcatgacgggctccgatggctacgaagggctaccaggccagcgctacgaacggtgccgggttgaccatcagcatagcggctcgcaggaccggtgccgcgcggagccgcggccgggctcgacgacgcgagtattggcgtcacgccattggaaggtgagtcattcatggatattccttattgttctgatcgcggcacgcaccgctagcccgcttcgatccgcgacggccagcaagcgagacactgacaagcacagcgaaagccgtgccagactggatcgggcattggtaaatatgctcctgcctgcacagggcgcgccccgtgctgctgccaggaaggcatcggcaaaccgagacggtcgtcgcaatgtccgcatctctggacatgctcaccacacgacacaccttcacgaacagccatgtcctgcgtgctggacagcgctgtgcccccccttggcttcggcgacgtgcatccaagcatgttgggccagggcttttttcgttattggcgccacggttagcgccgtccggttagttgccggacctgaactaccgctcatcgtcgatcgataagtggttagaactctgattggctcttattttctgagtaattaggcgacgggcaatgcagcgaatcgcattatttgtcgtctcgttaatatcgactttcaagacagaaggagtatctccatggctgacaagaaagaaggcatgagcgttaacgaagcgggacgcaaaggtggtgaagcaacctctgcaacgcatgacaaagagttctaccaagagatcggcagtaaaggtggccagaacagtggcggcaactttgccaacgacccggaacgcgcttccgaggccggtcgcaaaggcggccaaaatagcggcggcaacttcgccaatgaccgtgaacgcgcttccgaagccggccaaaaaggcggccagagcagcggcggcaacttcgccaacgaccgggaaaaagcgtctgaagccggccgtaaaggcggtgagcacagccacggcggcggccgtaacagctgatcgagtctgatgcagcaaccagggcgaaggctgagctttcgccctctcttttttagaggaggctcctatgacacgaggtgttggcggtgagtcacccgcaaacgtcacgacctttctcaaagggatcgactatcccgcgcggaaagagcaactggtcaagcatgcgcagcaaaatggcgccgagtcgtcggtaatcgatgtgctgcaaaacatgccggatcaggaatacgacaacatggccgatgttatgaaaggttatggcgaaacacgaaactagcaggttgtgaagacgtttcgttaaatcaaagcgagcatgagttaattattgttcgtttataaatgccaagccggaataaccagcttggcattttatctttggcgactgctttaaacgtccagcgaccggttttaatcaccacttacacgggttacgcatctatgtaacccgtgcgatcgagagcgggcgcccttcgcggttcgcccttgcgcggcgaaccatgtcggtactagccggcgagtacagcatcgaccagcgctttggcctcgtcctgaatacgctggaggtgcgcctcgccttcgaagctctcggcgtaaatcttgtagacatcctcggtaccggacggccgcgcggcgaaccagccgttgtcggtgaccaccttgagcccgccgatggcggcgccgttgcccggagcctcggtgaggatctgcgtgatcggctggccggccagttcgcctgcggtgacctgcgaggccgaaagcttgcccagcttggccttctgctcccggttggccggcgcgtcgatgcgctgatacaccggagcgccgaagcggtcggtcagcgcctgatagcgctcgcccgggtccttgccggtcaccgcggtgatctcagcggccagcaggccgaggatcaggccatccttgtcggtggaccaggcgccgccctgcttgcgcaggaaagacgcgcccgcggattcctcaccgccaaagcccaggcttccgtccatcaggccgtcgacgaaccacttgaagcccaccggcacctccaccaccttgcgatcgatgcccttggcgacgcggtcgatcatcgacgaggacaccaacgtcttgccgatgcccgccgtggcgctccactcagggcgatgggtgaacaggtattcgatggcgacggccaggtaatgattggggttcagcagccccaccgaacgcgcgacgatgccgtgccggtcatggtcggtgtcgcaggcaaaggagacgtcgaagcggtccttgttttcgatcaggccggccatggcatggggcgagctgcaatccatgcgaatcttgccatcccaatccaggcgcatgaagcggaaggtcgggtcgacgcgggtggagaggacttccagcggcagacgatagcgctcagcgatacgcgtccagtagtgcacgccagcgccgcccagtggatcgacgccgaacgtcagcccgctgttgcggatcgcttccagatcgatcacctgctccaggccgcccacgtagctttcgatgaaatcgaagcgctgcgtcgtcggtgctttgagcgcctgcgcgtaatccacccgttgcacgccgatcagcccggcaatcaacagcgcgttggcacgatcctggatccacttggtcacgccggtatcggccgggccgccattggtggggttgtacttgaaaccgccgtcggcgggcgggttgtgcgacggggtgatgacgatgccgtcagccaggccgctgctgcgaccggcgttgtactcgaggatggcattggagatggccggggtcggcgtgtagccgggctcgccattggtttcgctgcaaccggcgtcgatgcgtgtctcgacgccgttggccgccagtacctccagggcggaaacgaacgccggttcggataacgcatgggtgtccatgccaacgaagatcggaccgtcgatgccctgctcgcggcggtagtcgcagatcgcctgcgtggtcgccaggatatgccactcgttgaagctgtttttcagcgacgagccacggtggccggaagtgccgaacgccacttgctgcgccggatcggatggatcggggcgttcgctgtaatagcgcgagatcaaccgcggaatgttggtcagggtgtgttcgtccggaaggcgtcctgcatgggaatcgagactcatctgtcgttcctttaaaggtgaaaacgtgggttctggcttaaccgtggtcgcaggcaaacgccgaagcggtcggtcggcgccgcgcgtctaggcgctaagaccacccatccttgggctttggttcccgtgcaaggcgaatatcggggcacagcggcggcgcatcatagatgccgcgccccagcccagcaaagcgtcaggttgactcgcgcttcgagcagctctgctgcatcgcgccgaccacaggcgtaccgccgcggccgcccgattggcacagcgagcgccgacccgctttttcgtgagaggcgcgacccgcggcgaaagcgggcttgcggtcggctcgaaggcaaaagcgctgccgcgagagcgggcttctacaagaagcgcaacccgagtggcgccagctgcggtttcagcaatgcacggcctgaaggaaggtggcaaccacgtcgataacggcatcgggctgctcgcgatgcgggagatgacggcagccgtcgaacagcaccatctgcgcgctacctgcgctgcgttcgacgatacgatgcgggtgcgcgacggtgccgtactcgtcttcccgaccgtggatggccagcagcgggcattggatgagcggcgcgctgtcggccagcgtccaatgcgcatgggcgtcggacagccaggtgtcgacccaggctgagagcacccactcggccttgtcgccatggtatgggcgcaacctgtccatttgccccggttcggcgaacagcgcccgggcttcgcgaatgccctgcagcgtgcggtcttcgacgaaagccatggccgactcggtgaccaatgcaaggcaccggtccgggtagtgcgccgccacgctggcagccatggccccgcccacgctgtggccgaagacgatgaagtcttcgacgcccaggccccggcacaccagcgggaagtatcgtgcggcttcatcgccgatgaaccgcgtcgaccaacctcccggatgcaccgcagtacgaccgaagcccagccggtcatacgcgatgacatcgcgccgggtggcagccgcgagccgctcggggaagtcgcgccacaattcgacgcagccgagcgagtcatgcaacaggatgatggggacctgctccgcgttcgcccgccagcgacgcgtgaatacctcaccgtattcggtggctagatagcgatcttcggtttcgatgttcaccggttggttccttgctcggacgcctgttgccagtcgtcccgatgcctgcgtcgaagcgtgatgcacgggagcgccgtgctcagggtccgactgcctgaggtctgcgcgatccgactccaatatcagctgggcagcgccgttggctgggcggtcttttcccggtcgcgtagcaggaagcgctggatcttgccgcttggggtcttgggcagctcagtgacgaattcgatttcgcggggataggcatgcgccgacagtcgttggcgaacgtgctgctgcaactgctcggccagcgccgcgtcagccgggtgactggcatgcagcaccacgaacgccttcaccagctcggtgcgttccgggtccggtttgccgatcaccgccgcctcgatcaccgcgggatgctcgaccaaggcactctcgacgtcgaaggggccgacacggtagccggaggtagtgatcacgtcgtcggcgcggccgacgaagctgatgctgccatcgggattcaactcaacggtatcgccgctgaggtagtagtcacccacgaacgccttggttttcgcgcctacatagccggcgaaccagagcagcggcgagcgcttgcgatccagcgccagcatgccgggcgtgccgggctccaactcccgctgctgctcgtccagcaccacgacccggtgccctggcatggcatagccggcagtgccgatattcaccgcatggctcagggcgtggtgattgcacagcaccatccccagctcggtctggccatagtgatcatggatgatgcagccaaggccgctcctgaaccagcgaatcacttccggcgtaaggggctcaccggcgctgctgacggcacgcaactgccccttgagcttgccttccacctcggctcgggcggcgagcagcatgcggaatgcggtcggcgagccggccatattgttgatgccgtattcgcttatcacgcgacaggtgctatcgacggtgaagccgccttcgtagaacaacgtactgtggcccatcgccagcggcccggtgacggcgtagtacaagccatatgcccagcccgggtcggcgatgttccagaactgatcctccggccgcagatcgaccgcatcgcgcatgtaagtgacgaaggcaacgatggccttgagcggtacgtgcaactgctttgcagggccggtggtgccggaggtgaacatggccaggaaaggcgcctcgccatcgagcagaaccggctcgaaatcggcgaactgactattgagctgggtccagaagtcatccgttccattgcccacgacgagccgtcgcggcgccgcctcgatggcgtccagcttgctgtcgttcgcctcgtccgtcacaaccatcttcgcgccggactccttgatccggtgctcgacggctttcgggccgaatgcggtgaacagcggctggtagatcgcgccaaggcgccaggtgcccaggatggtgatgagcaactcaggtgtgcgcggcagcagaccggcgacggtatcgcccggcttgatgccatagctgtcgagaagattggcaaagcgcgcggcagcggccttgagctgtgcgaaggtccagtcggcccgctgcccgtcgcgaccttcccagcggagcgcgaccttgtccgaggcggcatgccggtcgcagcactcgacgcaggcattcatcgccgacaagtcgcccgaaagaatggccgacaccgtctggtcgtagtcgaactcgctggccgcagtgacgtaatcgcgcatggctggctcctggatttattgttatgaggtgccccgatagtggcgtcgcgtgtcaccggcaacaatggcaaaagccaccaagctggctgaatgttttggacaaccggacgagcgtgacgggcgccagcgccgggccatatcagggcctgggcagcccgccaccagccgacggcctcgcgccttgctgcaaggcgtccgtgtcggcagcgcctgcagacggcgcgagatgggttcagacctcggccttctccggcagcttcgcgatcaccttgatctcgaactggaagccatacagccaggtgacaccgacagcggtcagcgtcgggtgcggtgcctgcccccagtactcggaaacgatcttccagacggtttcgaacgtcgcctgcgcatcgaccatgaagatgctgacatccagcacgtcatcgaaggtgcagtcagccgcccgcaagatggcgttcaggttgtcgaacgcgcgtcgcacctgagcttcgagatcgggctcaggcgaaccatcctcgcggctgccgacctgccccgaaacgaacagaaagccgttggaacggatcgccggcgaatagcgattacgctcgtagagcgcctggcggccagctggaaaaacaacgtcgcgtggggtcattggatagctcctctgctacaggtcgtcgccgaccggtgattgatgatgagcccaatctaggtgcgcgggccttggcgataaactggcgcgtctacccatcactgtttgtaaaatccaaacaatctttgggagagagcagagatggatcgtttcgatgcgatgagggcgttcgcccgggtggtcgagaccggcagcttcaccaaggcagccgagacgttgcatatgagcaagaccacggtgacgcaactggtgcagcaactcgaggcccggttgcgcgtcaggttgctcaatcgcaccacgcgcaaggtcaaggtcacggccgacggcaccgcttactacgagcgcgtgctacgcctgctggccgatctggatgatgccgagaccagcctgtccagcgctgcggcatcgcccaggggccggctgcgagtggatgtgcccagcccgcttgcccggctcattctggtgccagcactgccggagttccatgcgcgttatccggatatccagctggacatgggcgtgagcgatcgcacggtcgacctgatcggcgaaaacgtggattgtgtcgtacgcggtggcgaactcaccgacctatcgctgacggcccggcatgtcggcgacttgcggctcggcgtctacgccgcgccgagctacctggaacgtgctggcacccctgcccacccacgtgacctgcaggacacgcatcaccgcatcgtcggctttctgtgggaacgtaccggcaagaccgttccctatgccatgcatcgcgaagacgagaccctcaaggtgatgggccgctacatcctgtcggtggacgacggcaacgcctatctcgccgcggggctggccggcatgggcatcctctggctgcctgactacatggccaaggggccccgggagcgcggagagctgcgcccattgttcgaagactggcagctcgatccgatgccgatgtatatcgcgtttcctccaaaccggcatgtcagcgccaagctgcgtgtgttcatcgactggatcgcagaactgatggcgcagcatgctcccatggcacagcgacgcaacgcctagcttgtccaggcggttccagagctgcctggcgccagggcaaataacgccaacgtcacggcagcagcgaggccacggcggacaacaatagcagcgccgccaggctccgattgaaaatcacccggcgcgctctgggtgccaggaatgccgccgcacctcgccccagcaaagcccaggccgccaggcacggcagggaaatgcaaaagaacaccagcgacagttgcgccacgtcatgccagcgctcggcgccgggacgggcgaacacgctgatcaccgcaacggccatcatccaggccttgggattgatcagctgcaagcctgccgaagccagaaagccgaggcgtggcccgatcggttggtcctgccggtgctcgggttcaggcgtcgaatagatctgccaggccaagtaactcagccacaggatgccgcctcctttcatcagcgtctgtagcagggtgtgcgtggccatggcatcgcccacgccgagccctaccgtcagcaccatcagggcggcaccggcacagccgccgagcacgatcggcaaggcgccgagcagcccgaagcgcacgctgtggctgagtaccagcacgttggtcggccccggcgtgatggacgccacgaaggcgaacagggtaaagggcaacagctcgatcatgtcaggccccttcctgcggctgaagggcgcaacgatgcatcggaatatggatcatggctcaggctcccgaatcgcttgaggagccagtttgaggaccgcccggtcaggcgtctggaagattcgagcagcgcgtgcggtagtgggccggcgtcagcccgtaggcacgccgaaaccagcgaccgaggtggctttggtcggcaaagccaagtatcgaggcgacttcggcgggcgcttgcccccgggccagcagatagcgcgccttggccaggcgcagttggatgaggtaggcatgtggcgcgagaccgaacgccgccttgaacgcccgcgacaagcgaaagcgactgacgccagatagcgcggcaagctcgtccagcccgaggtcctgatcgaagtgcgcgtgcaggtagtcgcgcgcgcggatggccacgcgtggcaggcgtggatcgtcgtgccgttcctgccgccagcgtagatggccgctgaggttaagcagcagcgtatccagcgcggtctcgcgcacgatgcgcaggtcgcgctgttccagggcctggaaggcgctggcgacagcggccaacaactgcgggcgctgcgtaagcgtagtggcgaatccgggctcaccgcggaccagaggcttgtcgtccaacgtgcgcagctcccgctcgaaccaggtgggctccagatacagcatcgaataggtgaacccgccttgggctggcgcgtcaccgtcgtggatttcgccgggctcgagcaggaatatccgccccggcgtgctctggtgcagcacaccccggcagttgaactgctggacaccctgctcggtgaaaccgatcaggtagctgtcatgccagtgtggatcgtacgcatgaccttcgaagtgcgcgcgaatggtctcgatgccggtatcggcatcctggcgaagggagatccagctgcgagcatcggtgtgcatcgagcgctcgggcatgacgtatcaaggtgctgacggtgagcctagaacggccccctgcccgatgtctggaacattcgtgcaggcgtcggcctgctgttgctcgcacaactcggttctcaggcaccgtcggaacacctgatgcagcggtagttgctgcgcactgtgccggctgacgagcatcagctcgcggtggaaggtcgcctcaccgagcgacagcacgcgtaccgtcggctcgcgctccagccacagcccggcacggggtaccagcgccacgccgaggccgctctcgaccattttgacgatggcatcgagctcgtcgagctccagccccggacgcgtctccaaccggtgcttgcgcaggaaatggctgacctgcctgccaccgaacgagccgcggtcgtaacgcaccagagggtgttcggcgagcaactggaacgggtcgtcgccttcgacatcgaggggcgtgatcagcacgaaaggctccagccggacccgctcggcgtgcaactccttgggcagcgcgaagggtgggcgaatcattattgcgagatcgatatcgccggcatcgacctgggacagcaggttcaacgaaacgccgggcaccagcttgggtgcaacgcccggcgcctcatggcgcaaccgcagcagcactggcggtagcagcccggtttgtaccgtggcgatggcaccaatgcgcagttcgccgctgaattccgatagcgactctggctgtcccatcagtgcgaacgtctcgaggatctgctcggcgagcggcacggcacgcatgcccgcggcattgagatgggccgagcgccctgtccgatcgaacaggcgcaggcccagcgcttcctccaggttcctgacctgggcgctcaccgccgactgcgtcagtccgatctggttacccgcccccgcgaagccgccgcagcgggcaatggccagaaaggttttgatctctcgaatcatgggtagcgctcgtctgatcgatttttttgaggctcgaaacgaaacatatccggtgtcgtccggtgcgacaactcgtccagaatggctggctctgttccactaaaagaaggaagcccgatgagtctctcccctttccaccttgcgattcccgtttacgacttgcctgccgcccgccatttctatggcgaggtattcggtctcgccgaagggcgctcatccgagcattgggtcgatttcgacttctacggtcaccaactggtcattcatgagcaccccaagacgccgtcgcaagcggccgcgcacaccaatgcggtggatggccacgacgttccggtcccccacttcggtatcatcctgagctggccggaatgggaagccttggccgagcgcctgcgttcacttggcacgcagttcgtcatcgaaccgtacgtgcgtttcaagggccaggtcggcgagcaggccaccatgttcctcttcgatccctgcggtaatgcgcttgagttcaaggcattcaaggacatgggccagctgttcgccaaatgaccacggaggttaccgcgacgatcctccgaccggcacggcgacgccgatccatgggcgatcgccagccggtgtcggccccttgagcgagacgatctgatggattcccgtaaacccctggacgggatggccgtcggcctgatgctgatgctctgcctgatctgggagcttgcagcagatcgtcttgaaagcgaccgccacggattgctcgcccgtgctgcagatcgccctgcgctccggtattgccgcactgctcgtcgcgatcctgatgctctggcgtcacgagcggctcaccgtggcgcacggcatgtggaagctgggatgcctggccggcctctgttttgcgctggagttcctgctggtgggcgaagcggtacggcacacctcggccggacatgtcgtggtgttcgtctacaccgcgccggtgttcgccgcgctcgggctgcactggaagttgccgaacgagcgcctggccccgctgcagtggattggcataggcctggcgtttgctggcatcgcggtggcctttctgcgcggcgccgataccgaagccgggctatccggcgtgctatggggcgatttcctcgccctgcttgccggcgcagcgtggggggcgaccacagtactgatccgagccacgcggttgtccgccctgcccgccacccagacgctgctgtatcagctgatgatggggttcgtcttgctgctgccgatcgccctgctgataggccacaccaccttcaatccgaccccgctggtctggctgagcctgggcttccagtcgctggtcgtctcgttcgccagcttcctgctctggttcgccctgctgcgtcgttacctcgcctcgcgcctgggtgtgctgtcgtttctcacgccattgttcgccgtcgcgctcggggcctggctgttggccgagcccgtggaaccgggcttcatcgccggcgccatcctggcactgagcggcatcgtgctggtcagtggctacggctggcttgcatcgatcatgcggcgctagccgcagatcacatgctcggtgcacgcacattgcccaccgccgccgctggcaagccgcacgcttgtcggcgtgcagggataggcggcacatggacgttaccggtcgcatatcacgccgtcagcgcagcctgccattcgcgggggctggccccggtcttgcggcggaaggcacgggccagcgccgacggactctcgtagccgacctcgtcggcgataagcgcaatcggtcggccttcacgcaagcgcttctgcgccagactgatccgccagctggtgaggtaatcggcgggagtctgccccaccaccgcccggaagctggcggcaaagctggcccgtgacatgttcgactcggacgccagctcggccaccgaccaggcgcgctcgggttcggcatgcatcagggtaatcgctcgcgccaggcgcagatccgccaacccggccatcatgcccgagctcatcgtctggctggccatcaggtggcgcagcatctgcaccatcagcaactcgaacagacggcccatgaccgcttcgcggccacagtagctggcgaccgcctcatcgaagagccaagtcagcgccccatcgaggatcggggcttcggcgactggcagcaacagcacatccggtaacgctgcggccaacggattgttgatgccaccgtcgaaacgcaaggttgcgcagaccagccgcgcgccttccgcttcatcggcaagcatccggtgacgatatggccgcggaaacaccatcaccgtcggttcggtcagccgaacctcgctgttgtcctccagccgcaaggtcatgctgccctgacgcaatacgtggatgtagcccacctggtcggcggtctcgaacgccgcgacgccgcaaagcgccccgctgtgatacaggcccgcatgcatgccgaagtgacacagcaggctggatagacgatccatggttacgcctcgtttagacgatcggttgcatattctcgactatttgactccttaacgatacgtcggctgcgcattatgcccctgcacctgatgcacagcgctacgaagcctgagccgatcagagaggtgcccggttcgccggtagcgccagcgtcccctaatccgagccaactcacgaaaggtacaacgtcatgaccaccaccaaaacccgcaacactatcgccgccaccctcctcgctgtttccacactgggcagcgcgacgagcttcgcagccgagaaaccgacggtcatcctggtccacggcgcctttgccgaatcggcgagctggaacggcgtagcctcacggctgatcgaccagggctacccggtggtcgccgccgcaaacccgctgcgcggggtggccaacgatgctgaatatgtctccgacatcatcgagcacaccgccggtcccatcgtgctggtcggccattcctacggtggcagcgtcatcaccaacgcggtcaagggcagcagcaaggtcaaggcgctggtctatgtggccgccttcgcacccgcggttggcgagagcgccgccgtgctggccggccagtttcccggcagcacgctcggcccgaccctggctgaaccggtgcagctcggcgacggcaaccaggacctgtatattcagcaggacaaattcgccgagcagttcgcagccgacgtcgcgccggccgaagcggcgctcatggctgcgacccagcgcccggtcacggcggccgcgctgaacgaaggcagccagcagagcgcctgggattatgtgccttcctggttcgtctacggcaccgcggacaagaacatcccggaagctgcgttgaagttcatggccgagcgcgcgggttcgcgcaagacgctgaccatccccggcgcttcccacgtggtgatgacctcgcaccccgacgaagtcgccgcactgatcagcgaagctgccgaggccaccaacaaataaccaacaggcatcctgcgccggtcgacgagctcacctcgccggccggcgttgccgtgtcaccggcaaatgagcctgcatggatgcctttcgccaagatcgaccgaactcacaacgagcccgcgatgtgctccctcagccatcggtgcgccgggtcgcgatgacagcgttcatgccagagcatcgccatttcgtagcccggcacctgaccggcggctcgaccacccgaagcgcggcattgccccgtaccaggcgccacggcaacatcgcgaccagatcagtgtttgccagagccgcgatcacgaacaggaaatgcggcaccgagagcgccacccgacgcgacagcccggccgctcgcagcacgccgtcggtcacgccgctgaaaccaccgccatccggcgacaccacaatatgcgcaagctcgcagaagcgtgcgatcgacggcggcgttttcaagtccggatgccccgctcgtccggccagtacgtagcgttcggcgaacagcacgcggcgatgcaatcccagtggtgcgtcatcgctggtatggaagactaagtcgatgtcgccctgctccgcctgtttggcaatgcgggtcggtgccatctcgacgaccgccaatcgcgcgccgggcgcctggagacgaaggcccgccagcgccggcagcacgatggtcgactcggcgtaatcggtcgcggcgacacgccaggtatgggtagcgtcggcggggtcgaaggctgccgaaggcgacaccacctggcgcagcgcctcgagcacctgacgtagcggttcgcgcaattcctgcgctttcgccgttggccgcatgccgcgcggaccggggagcagcagcggatccgcgaagaagtcgcgcagcttggccagctgcacgcttaccgatggctgagccagattcaggcgctgcgcggcacgcgtcacgttctgctcgtccagtagcacatcgagcgtcagcaaaagattgaggtcgagtttgcggagattgctcatgacaataccaggcatttcgagtattcatttttaacatagctgagcaggtttcatcctcttccctccaacccaagggagctcagctcatgaacattcttatcgtctatgcccatccggaaccccgctcgttgaacggctcgctgaaggatttctcggtccagcgactcgaagcggcgggccatcaggttcgggtatcggatctgtacgcaatgcagtggaaggcctcggtcgatgccgaggacgacctcgaccacccaccaggcgcacgcttcgaaccatcgctcagctccaggcaggcattcgaacgcggcaggcagcgagcggacatcgccgacgagcaggagaaattgtgctgggccgacgccgtgattctgcaattcccgctgtggtggttctcgatgcccgccattctcaaaggctggatcgatcgggtgtacgcgtatggcttcgcctatggcgtcggcgaacattccgatacgcactggggcgaccgttacggtgaaggcatgctcgccgggaaacgcgccatgctggtcgtaaccgcgggtggctgggaatcgcactacggtcctcgcggcgtcaacgggccgatcgaggacctgctgttcccgatccagcacggcgtcctctattacccgggcttcgacgtcctgccgccgttcgtcatctatcgaaccagccggatggacgaagaccgctacgcaaccgtctgccaccacctcggtgaacgtctcgatacgctgttcagcacggccccgatcgccttccgcccgcagaacgccggtgcctatgccattcctgcgctcaccctgcgcgatgagttcgcgcccggcgaagcgggtttccagatacacgtagcccgggaatagcaggtgtgggacgcgctccgtcaggcgaacgccggtgctcatcgccggctcggtcgcggcatcgccaagggcgcatcggtttcggctccgtaatgccggaaccgtctcggacgggctaaacaaaagcgatgccctaccgataacccggtatgccaggcgagactcacgttgcggtgcgtcgcgcgggtatctgtcaaccggctcccacaccgcctcgttcaacgcggcgggtgctgaggtcggtatcgcccacccgtaaacggagccacaccgtgcaactgatcgataaccgagcgctgatcaacgatgccctgcgccaatctgcggagctaaccggcgggcgtttcgatcatcgctattggttgagcaaggtgacggacgtgaagctgctgatcatctccaagccggaggtgctgttcgacctgtcggtcaaggtctacatcccgttgccggctgggcagaaagcgccgctcacttacggcgacggctggttcaactggcacttcctcggcagcaaaagcgccgtggtcaccatcgcccgggaaatcctcaccatcgccctgcgcaaccgcaaggccaactcggcggtgctgcaggcctggctcaccgagctggtgtccttcaagcacagcgaacacaccatcgccgtgctcgagcctgagccgcagcaggacctggccggccgctaggccggctcgcccgaaccgagggccgcctcctcgtaatccagctcctggagcagggtctgcaacatctgctcgtcgatcacgtagcgtttgcgcatgcggtatagctccttacgctgcaccgcgatggcctgcatgcgaatatcgcgttccaatgccatcgtctggcgcgcctggttggtgcgctcgtggtggtccatcagcgcctcgatgtccttgcggtaggactcggtgacccgcgcggtcacctcgctgcgcagcagcatctggtcgggatcttcgaccgggttggcctgtttccagttttccagccagctgacggcagcctgcgccgcagttcggcgagctttcttcagttcctcgcggtgctgttccacgtcgttgttgggcaacttcttgaggaaatagggaatgcccagggcgcccaccagcagcgacaggatgatcaccgcggcggcgagaaagatcatcaggtcgcggcccgggaagggggtatcgccgatcatcagcggaatcgacagcacgccggccagggtgatggccccacgcacgccggccaccgcgctcaacgcagagaacagcggaagcggcttgggctgcaccgtcttgccgagcaggcggagcacgcgcgcctcgctccagtgataagcgaagacgaacaggaagcgaatcaccagcagcaacgccatgattgccagcgcactgaatatcagcatcggcatccggtaggtttcctgacctgccgccgcccagacgcgctcgacgatgcgcgggaactgcagccccagcagcaggaacaccagaccgttgaagctgaaatcgagcatctcccaaatgctgcgattgaggatgcgtgtgctggtcttgaccggcagcatgtcgatccggctctggatcatgcccgccgccaccgccgacagaatgccggacatcccggcatgctcggccaggaaaaacgccgcgaaaggcagcagcagaatcatcaccacgtaggtcgacggatcgaacaagtcgcgtgccgtcatccactgcttggccttgccgaccgcccagctcaggccagcgccgatggccagcccgccgagggcgatgacgaagaattcgccggtcacgctggccatcgagaacgagccggtgatcgctgccgccaatgcgaacttgaaggacaccaggccagtggcgtcattcatcatcgcctcgccttccagctgatgcgccatgtgccgcggcaaccggccctgggcgatggcgatcaccgccagggcgtcagtgggcgacaggatcgccgctagcgcgaaactcgccccgagcggaatggcgggcaacagccagtggatgaagtaaccaaccaccacgaggatgaccagcaccagcagcagcgacatcgcgctcatctcggcgccgtgctcggtgaattcgcgcttggggattttccagccgtcgtagaacagcaacggcggaatgaacagcagcatgaagatttcaggtcgcagctcgacccccatgccgaacggcggaagcgccagcacgctgcccatgatgatctgcagaatcggcagcggcagggggatgacattggccaaaacgcggcttgcgcccactgcgagtagcagcaggaagatcaggtaaagcgtttccatgaggcggggctcttgctaaaggtaaagatggtgcatatgaccggtacgcgcgtgacaaaagtatagtcaggcgtttgggtatagccggctcgctcgtcagatccgttcggactatggccacaagaccggtgtcgctgcatgtagcgtcagacgcagcgcggtcagccaccgtcacgccctgacgctggttttctgtcgcgcattgccgccgtttatcggatgtctaggcaagcggacacgctgtccagccgggcaggcaagttcttccgagtatgtcggtttcctcagacagcaaggcggcacgcccgaccacacccagaagctcgccagaacgcctgccgcgcggtgcgcagacagggtgcgaccgcttatccggctttcgtctggcgcgcacgtggctggcatgggtttggctgttaccacgatgcccggcgtagggttcctgggccgggtgcgctcgcctcgcggtatcggccgcaggcagaacaacaacaacaacaagaagaaggaagcccttatgaatgcacctcgcatcgcccgcgccagtagctccccgccgctgctgcgggtcgccccggtcctgttcgcggccgccctggccgaacccgcccttgccgccagctgcaacgaactttccggcaagcagatacctgcgtccgccatcgccttgccgacctctggcgcgcgtgtgacctcggccacgccgatgccggccggaggcacaccgccccagacgttcggtccctattgtgaagtgacggcggaaattaccccggtcgatccgagcgcgcccacgatcaggatgcgcctggtactgcccgaacactggaacgccaaggcgatgatgtacggcggtggcggttacaacggcaccgtgcccaacgtagccggcaatattccggctggaccggtcgaccagccgacaccactgggccgcggttacgccgtattcgccagtgactcgggacatgtcgccaacccgatcaatcccggcgacttcgcctggaacgaggaggcgctcgccaactacgcgcacgacgcgctgaaaaagacccgcgacacggcggtctacctgatcgagcagcgttacggccatgcgcctcagcgcagctacttcgctggcggctcgaccggcggccgagaggcgctcgcggtggtgcagcaatggccgaaggatttccagggggcgattgccctctatccggcctggaacgcggcggcgctggacctgcaattcggtcgcatcacccgcgcgctcgccgcaccgggtgcattccccagcctggagaaacgcgccgcgttgctggaagccgcgatgcaggcctgtgacgggctggatggcgtacgcgaccggctgatcagtaatcaagcggcctgcaatgcctggttcgacccggcgaaagccaagctgaacggccgcccgctgcgctgcccgggcggcgccgatacaggtagctcgtgcctgtcggacgcgcagatccatgccttgaaggtattcgagacgccgatccggttcagccagccgctggccagcggggagcgcggttatccgggcttcaacacctggggcaccgacctgggtcgaccaggcgaggggttgcagccgatcgtcaatcggctgggcctgaacaccttgcagcccgactatccgatgcccgtgcacggcaccgggttcgccgagggtgcgccctaccattcgggcttctgggacgagagggtacgctacttcgtgacgcgcaacccggcgttcaacacgttgacgctcgatccagccaacctcggtccctggcaggcgcgggtcgatgcgctgtcgctgcgccaggatgtcaaccagacggacctctcggccttcgtcgccaacggcggcaagctgctgatcgctcacggcacctcggaccagctggtcagtacccgcgccagcgccgattactatcgccgcgtgcagcaggacatgggcagagggcggacacggcagttcatgcgctactacgaaattcccggctacgcacatgccgccagtaccgtcttcaacgcggcctgggactccttgacggcgttggagcagtgggtcgaacgcggcattgcgcccaagcggcaaacggttaccgacacggtcgccgttcctggccgtacccgaccactctgcgaatacccggcatggccgaagtacaagggccacggcgaggtaaacgacgcgtccagctttgtctgcgtgaaaagtcaaaaaggccgtcactagagcgccatggacgtcgcgccctgccaatgtctgatgggcgcggcaaccagcgtctgcaaccaaacgtccagctggatggacagcgttcggcctgccttggcgaacatgtccagccagccggacagccctctccttacggcttgcggctgttccgttccataagccagttgctgcgcggctctggctcggtgcttcccgccccgagtccggacgccccgtagcgcctggcacggcattcgctaccgctattcgctgaaggcacctggcaacaccatccaataacaacaaaaggaagcaccatgaaagaccgtctccctgttcgccgcctgctttgcgccagcatcgcgttgagcatcgccggcccggccagcgccgcgtttctcgatgacagcaaggccagcgtcgaattgcgcaacttctacatgaaccgcgacttccgcgagagcggtgcgagccagtccaaggccgatgaatgggcccagggcttcatcatgaagatcgaatcgggctacaccgaaggccccgtcggcttcggcctcgatgcggtcggtctgctgggcatcaagctcgactccagtccggatcgctccggtaccggcatcctgcagcgcgaccgtgaatccaagcgcgcccaggacgactacggctcggcaggcctgaccgccaaggcgaagctgtccaacaccacgctgcatgtcggcacgctacagccgatcatcccggtggtgatgcgtaacgacagccgcctgctgcccaacacctaccagggcgcctggttgcagagcaaggagctcgatggcctgacgctcgatgccggcaagctgaccgacatcagctatcgggactcctcggacagcgaggagatgaccgtcttcaacggcggagcgcgcaatatcgtgctgggcagcaccaagaccagcgacgagttcctcttcgccggtaccaagtaccagttcagcccggagctgaccggcagctactactacggaggcctggacggcatctacaaacagcacaacatgcagctggtccacgtcatgccgctgggtgagagccagagcttcaagaccgacctgcgctatgtgcgctccaccgatgacggtggcagcaacgtcgacaacgatgccttcggcgcgctgttcacctacaagatcggtggtcacggctttaccggcggctatcagaagatgagtggcgacactggcttcgcgtacatcagcggtggcgacaacatgctgatcaatctgttgcagatcaatgacttcggcaaccaagatgagaagtcatggcaggttcgctacgactatgatttcgccgccctgggcgtgcccgggctgaccctgatgacccgctacgtgtccggtgacaacgtcaacctggccgccggccgcgaaggtgaagagtgggagcgcgacaccgacatcgcctatgtcgtgcagaacggtccgctgaagaacttcggcatgaaggtgcgcaacgccacggtgcgcagcaacttcggcagcgacctcaacgaaacccgcctgatcctcagctacaccctggcgctctggtaaacccaggcgccttttaccgcaacacccctcctcgttgatccttttaccgggcctgtggcccggttctttattggatcgacgcagcagccacatctgcatagagaaaatccagcaccggtcgggtgaaggcctcgcccgcctcgacattcgacagatgagcggtttcaagctcgatcagctgtgcctcggagacccgcgcctcgatgaagcgcccatgctcgaccgtcgtgaccgggtccctgctgccacagacgatcagcgtcggtaccttgatcgcccccagctgatcacggtaatcggcgtcgcgcacggccgcgcagttggcggcgtatccggcgggcgacgtactggcgatcatctgggtgatgcgatcgacctccaccggatgctgtcctgcgaagccgggcgtgaaccagcgtgcaacagagccgtcacgcatgtcgcgcatggcctgttcaccaccgcgcagcactccatcgatacgctcgttccagacatcgtcggtgccgatcttcgcgccggtgttgcagatcaccagccgcgtcagccgctcaccagcattgatgcccagccactggccgaccaacccgcccatggacaggccacagaaggcgaaacgatcgatcgtcaaggcatcgaccagatcgagcacgtcccacccgagctgctcgatgctgtacgggccgggcgtgacggacgaaccgccgtgcccgcgggtgtcatagcgcaggacgcggaaatgctcgctgaaggccggcacctgcgcgtcccacatatcgagcgtggtgcccagcgagttggacagcaccagaaccggcgcatcgaccgggccatcgagacggtaatgcagttcgccatcggcgagtttgacgctgggcattggaacctcctgaataaaatcgaatgacaggtgcagataggctgaccagctggtgggctgaagttcatcctgcaacgctgaagcggtcggtggactgaagcccgtccttcaggactggtcgataagggtgggctttagcccaccaatggcgagcgttctccccgtcatgctgggctgaagcggagcgcagcccggccaatcctactgagtggcctgacccggcttctctgaaaagatcgcagtcaagaccgctcccacacacgagcgcgcatagccttaagcgcagtcaccaaccccgtgggagcggtcctgaccgcgaatggcagcggatgggcttttagcccaccagcccctggcggcgttctgcctcagcccaccaaggctagacgtcagacccgctcgacggccaacgccagcccctgccccacgccgacgcacatagtggcgaggccgagcttgccgccggttttctccagcgcgtgcacggtggtcagcaccagccgcgcaccgctcatgcccagcggatggccgagcgcaatagcgccgccctgcgggttgaccttcgggctgtcgtcttccagccccagatcgcgggtcaccgccagtgcctgtgcggcaaaggcctcgttgagttcgatcacgtcgaagtcgctgacggccaggttcagccgctcgcacaacttgcgcaccgccggcaccgggccgtaacccatcacgcgcggcgccacgccggcgctggccatgccaagcaccttggcgcgtggtgtgaggccatatttctgcaccgcttcggcgctggcaagaatcagcgcagccgcaccgtcgttgacgcccgaggcattgcctgcggtaaccgtcttgtccgggccgttgaccggcttgagtttggccagcgcttcggcggtggtatccgggcgcgggtgttcatcggtatcgactacggtgtcgcccttgcggcctttgatcaccaccgggacgatttcctcggcgaagaatccggcggcctgggccttgcccgtgcgttgctggctacgcagggcgaaagcgtcctgatcttcacggctgatcttgtgttcttcggccacgttgtcggcggtctgcggcatggcatcgacgccgtacatatccttcattttcgggttgataaagcgccagccgatggtggtgtcttcgatcttctgcgtgcgaccgaaggcggtatcggccttgcccattacatagggcgcgcgagtcatcgactcgacgccgccagcgatggccagctccatttcaccgcaggcaatggcacggaaggcgctgcccaccgcatccatgcccgaggcgcagaggcggttgagcgtcacgcccggcacggtttccggcagcccggccagtagcgcggccatgcgcgccacgttgcggttgtcctcgccggcctggttggcactgcccatgaagacttcttctatggccgccggatcgagcccgggattgcgctccagcagggccttgatcggcgtggctgccaggtcatcggcgcgcacggcagccagggcgccaccgaagcggccgatgggcgtacgtacggcgtcgcagataaagacttcgcgtgtcactcgtcacctccagattgtccgtgggcggcggcggtgcgggcctcgagggcgcgcagagcctccagttcggtctcggtgggcggtgcggtttcgccgacgttgtcagcaaagcggatcgcccagcccgtgttctcgctcacttgctcgcgggtcacgcccgggtgcagcgacgtcaccacgaattcattggacccggcttccggctccatgatgcacaggtcggtgatgatgcccaccggcccctgccccggcagcccgagctgcttgcggtggtcaccgcccttgccatggccgaccgaggtgatgaacgccagcttgtcgacgaaggtgcggtgcgactgcttgagaatgatcagcacctctttcgccgacccggcaatttccggcgcgccgcccgcccctggcaagcggactttcggttggtgatagtcgccgatcaccgtggtgttgatgttgccgtatttgtcgacctgcgccgcaccgagaaagccgacgtctatgcgcccgccctgcaaccagtagcggaagatctcggcggtgggcaccacggtgtcggcagtttcggccagctcgccatcgccgatggacagcggcagtaccgagggcttggcgccgatggggccggactcgtagatcagcacaacttccggtgcatgggtcaggcgtgccaggttggcggcctttgacggcaggccgatgccgacgaagcagacgctgccatcgcccaggcggcgagaggcggcgacggtcatcatttcgctggtgctgtagttattggcgtgagcgctcatcacttggcctcctgctgcgcggccagcttggcctggaacgcggaaaagtcttcggtgccgcggatgaattcatcgacccatgcgttgaaggcgtcgcgatcccgggcaatcggatcccagcgctgatagaagcggttgtcacgctcgtaatagccatgggcgtaggacggatgggcgccgcccggcaccaggcaaaccgcgctcagcgcccaggtcggcagcacacaggcgttcatcggtgcctgcaggtcatcgacgatctcttcgacggtgacgatgcagcgcttggcggccagtgcggcctccttctgcacaccgagaatcccggcgatcagcacgttgcccttgcggtcggccttctgcgcgtggatcaccgtcacatcggggcgcacgctgggcacggccgccaactgctcaccggtgaaggggcattcgatgaacttgatcatcgggttgaccttcggcaggtcagagccgagataagcccgcaacacggcgaacggcaggccggaggcaccggcaacgtaggcgttggccaggtcggcgtggctgtgttcctggacttcgagtggttgcggccactgcctctccaccgcgtcgcgcagacgatgcagcgagccaacgcccggatttccaccccaggaaaacaccagcttcttcgcgcaaccggcgccgatcagcaagtcatagaccaggtcgggcgtcatacgcaccagggtcaggtccttcttgttctgacggatgagttcgtgagcggcagcggtgggaattagatgggtaaaaccttcaagggcgacggtatccccgtcgctgacgaagcgatcgattgcttcgttcaggggtagcagctgggccatgggtcatgtctcgtattgatgtcctaatcacgaacgaatccgcgtctgggacgaacactaaacatcgagtccgcatggaacaatccgataatcgcatcatcgtgcggttatcgaacaacatcttattgctcaagacttcatatctgcccgaagacttcgccgcagtcgatcaatggaacaagcgcgtgctcagttccttgctcgcttccagcaaaaccggcaggaagcgcgtctccagctcctgcttggacacccggctcgcatgggtgccgacattgagtgccgccagcacctggccggcggagtccttcagcggcacggccagcgaacgcaggccgacttccaattcctgatcgatgatcacccagccctgctgccgaatgtcctcgatggatgctcgtatggcctccggcgtgtgcagcgtgcggctggttttgatttgcagattggcgtgttccagatagtccgccagcgccgcatcgtccagcgcagccagcagaatccgccccatggacgtgcaataggccggcagccggctgcccacgctgagatcgacggaaatcaagcgctgcggcgtggccgaacgtgccacgtaaagcacttcgtcgccctccagggtcgccatggagcatgcttcgtggagttgatcgctgaggcggtcgagaatcggctgtgcggtgaccgccagtggcgtcgaggagaggtaggcgtggccgagcgtcagcaccttcggcagcagcgagtaggtgcggccgtcggtggtggcgtagccgagtttgatcagcgtgtgcagacaacggcgcaccgccgcgcgggggatttccgtgcgatggcttatctgcgcgatggtcaggtggcgcttgcgctcctggaatgcatgaatcaccgccaagcctctcgccaaggaggtcatgaagttcgggtcaccggtcagcgcttcgattcgcttggccggcgacgcaatgatggccggcgccatcgggacactacgagagcgagattcgtcgttcatgcgcgggcaacctggtcggtaaaaggtgttcgattatcgtccagctgaccggtaatcgcaaaaagcacctaagccggcctatttgccaaaaacagccgagttacagcaattgcggctgaacaaagctgtgccgatccgtttgttgcagcacagcgacacggcggcccggtgagcaccgagcgccacgacaacccgcagggagaggcggaatcagcgcacctgtaatactcgccttgcacgggcatgcgggggcaaccgagccgggctgaccggcgcctgtcgcgagctgacgttcaggggtggttcatcacgctggtgatgcgctgggccagggtagcctggtcgaacggcttgccgagccggggaagccgtccggccgcaccgctcagcttgtcggcgtagccggtggccagtattaccggtaacgccggatagcgatgccggatgacctctgccagctgagaaccggtcatatggggcatggcctgatcggtcagcaccagctggaccttctgctgcgccagcacgtccagggcctgctccgccgagctggcctcgaccacatcgcagccgaggtcctcgagcattgcggcgatcgtcatcagcaccagcgggtcgtcatcgaccgccagcaccttgagtgcgaccggcgcctgcggctcgggcgcgggcagcggtacaggctcgacggactctgcggcttgcgctgcgatcggtagccatagctcggcggtcgtcccctgccccttcgtgctcttgagcacaagtcggccacccgattgggcggcgaggccatgaatcatcgagagccccaatccggtgcccttgccaacacccttggtggtgaagaacggctccatcgcctgctcgagcgtcgcctcgtccatgccctcgccgtcatccgccagggccaggcgaaggtagtcgccgggttccaaggggccttccctcgactcgagccggtgttcacgcgcggagatgatgacgctaccgccgtcgggcatggcgtcccgggcattcaccgccagattgagcagcgccatctcgatctggttgacgtctgccagcaccggtctgagcgacagcggaaagcgggtttcgatctgaatatcggggccgagcgactgacgcagcaagtcggccatcccgcgcaccagcgcgggcacatcgaccagttcgagatggagctgctggcgccgcgcgaatgccagcatgcgcttggacaaggagatgccgcgttgcgcgccgcgcatggcgttgtccagcagcgggacgacggttggatcatccgcaacccgtcggcgtacgatctccagcgcacccagaaccgccatgagcaggttgttgtaatcgtgggcgataccgccggtaagccggccgagcgattccatcttctgcgattggaatagcgcctctcgcgccttttccaatgcgcgctgtgcctcgacgctctcggtgatatcgcgggtaaccttggcgaagccgatcagcgtgcccgtatcactgcggatggggtccaccactacgctggcccagaagcgcgaaccgtccttgcgcacccgccagccctggctctcgaaccgcccttcgcgcagtgccgtgtcgagcccacgctgcggcgcgccgtctcgccggtcctcgtcagtgaagaaaaccgaatagtgacggccgatgatttcgtccggtagatagcccttgatccgctgcgcgcccatgttccagttggtcaccaagccggtcgggtcgagcatgtagatggcgtaatcggaaacgccctggaccagcaagcgaaactgctgttcgctctgtttcagcgcatcctccgccagcttgcgctcggtcaggtcgcgagtgatcttggcgaagccgagcaagatgccgtccggcgcccagatcgggtcgaccaccacgtggcaccagaaccgcgtcccgtcgttgcgtacacgccagccttccccttcgaagcgcccttcgctgatcgccgtatccaatgttttctgcggcatccctgcggcacggtcttcctcggtatagaagcgggagaagtgctgacccaggatgtcggcttcggcgtatcccttgaagcgtttggcaccggcattccagctggcgacgcggccgtcggcatcaagcatgtagattgcgtaatcggtgattgcatcgatcagcaggcgatatcgatcttgctcgcgcatcggcgcattcttggacgcggcctcttgcatgaaaatatccagccgagtgatttagtcgggattatgaccacccaggcgcagaaaagaaaatcaccgcggcgccgtatgtcacagaccgatcgatcaatcggaacgtgccctacgaacgggcaatagctgccgagctccgtgcgccagtcgaccccacattcgccagcctaggcaatgtcggcctcgttgcaaccctggtgcaccagcgcggctcgaagccaggcagccgcggtatacatcgctcgggaaaccaagcagcagacgcgcgcgcaggagctgataacgtcgttggggatgaagaggtgtcgctcgccgggaagcgccacatcggcgatcccctgcgttgcgaccaagcgaccgagcataacccaggcgcctgtcgatcggcccagcggaagcgctggtctccgaggtatcgcgggcttaaaccgagaagcgggtcaccagggtccgcagtcccaccgcaagctgggcgagctcctggctggcagcgctggtttgattcgcgcccgcagatgtctgcatggacagatcacggatattgaccaggttgcggtccacctcgcgggccacctgcgcttgctcttcggaggcgctggcaaccagcaggttgcgctcgctgatggttgcgacggccgcggcgatctgattcagcgcctcgcccgcggcctcggcaacgaccagcgtggagcgcgcctgatcattgctgcgctgcatggcctgtaccgcgcggtccgtgccctgctggatgccgccgatcatctcctcgatttcctgtgtcgactgctgggtacgatgcgccagcgcgcggacctcgtcggcgaccacggcgaagccacgcccggcatcaccggcacgggcggcctcgatcgcggcattgagtgccagcaggttggtctgctcggcaatcgcacgaattacgtcgagcaccttgctgatgtcgcgaaccttgtccgcgagctctccaacctggcccgccgttacggttaccccttcggccaggtcgttgatcgattgaaccgtgcgagccacctgctgctgaccttcgcgcccggagcgctccgactgcttggacgcttcggccgttgtaacggcattgcgggccacttcgtcgacggctgcggtcatctgattgacggctgtcgcggcctgttcgatctcgccgttctgctgcgccagaccgcggctcgaatcctcggttaccacgttgagttcttcggccgccgaggccagctggttcgacgagtcggaaatgctctggatcgttttgcgcaagctcacctgcatggctttcatcgactcgagcaagcgcgccggctcgtccttgccctgcacgtcgatggttctggtgagatcgcccgctgcgacgacctccgtcacccgcaccgcctcggccagcggcacgacaatgctgcgaatcagcaaccaggccagaagaatactggcgagcgaggcgacgatgatcgcggcgatcaccgccagacgggcgctgtcataggtctcgtttgcgcccaccgtcgcggcctttgcaccgttgttattgaaatcccccagcgcgatcagcgtcttcatcagcgcatcggcgttcgtcagcagggtcacgttgagataattgcgggcatcgtcgagacggccctggtccgcgtagccaagcacggtctgctgatcattctggtacaccgcgtaggcacgcttgaaatcatcgaacagcgtctgctccgcagcaccggtgatgtagcgctcatattcgacgttcatcttctcgacccgacttttcagctcgtcgatgttggcaatgttgttggccaatgcggccttgtcggtaagtaccaacgtgcgaagcatgaagattcgttgacgcaagatcgcttggttcacttctttgagggctgaaagcgatggcatccagttctcactgatgtcgtcagcggctgtgtccattcgagccatctgggtcagcgagaacagtccaatgcatgcaagcaggaacgcgaccaggccgaaggcgagcgtcgcacgaagagtgatgccgatgttgcgtaaagacataaaaattaccatccggaaaatgagccaaactgcgcactacggctggctggccgcagtgccggcgatggccggcgacaagcacaacggcccagcctgcatatcggcggcatgtacggacctttagcggttgcttgcgttttattgatcctgatcaggaaaaccgggcccgtaattgcccagcccccgacgaacggttgcgaggctttgatcctcgccagtgcagacggataccgaacgcgatcggtccggtcgctaagtagcgctaaccggatagcccgtggacgcacgcaaggtgtcagcgatggcctgcgcggccaccgaaagttcgtgtccgggtttggtaagaatgcctaccggtttctcgatcaccggatcgccaagcgcgacacagctggcgccgagctcgagcatctgctcgcggcacagcgccggcacggcgctgacacccaggccgctggcgaccatccgccctaccgtcgccagctgatggctctcgaactgaaccggcagttggcggccgcgcggtcgcaagtggtcctcgagcatgacgcgcacggtcgaggggcgctggagggtgatgaagggatgctcgagcaaggcggcccagctgacttcagcctggctcgccagcgccgaatcggctggcaccaccgcgacgaaccgatcgatgtacagcggcgtgaagctcagcggcatgctgggttcgggctcgaaggcaatgccgatttccacctgccggtcacggaccatttccatcacctgttcgttgatcacgtcgtgcacggtgacgctgatcgaggggtagcggtcgcgaaacgtgcgcagcacggccggcagcaggttgccggcgaaggatggcatcgaggccaacgccacccggccctggcgcaaggtgaagcgctggcgcagctcatcctcggtgttatcccaatcggccagcagccggcgcgccaggggcaacagcgcctcgccctcgggcgtcaggctgacggcccgcgtcgtgcggctgaacaagcgaccacccagcccgtcctccaacgccttgatggtaaggctcagcgcggattgggagaggtgcagccgttcgcacgcctgggcgaagctcagcgtctgcgccaccgcgagaaaggcgcgaagttgtttgacggtcatcggatcggctccgcaagggttcggcgaggcgctatggcgctctttgtttcgatttatcaatcaatagcgcttaaaaatcaacttaacaaatccacgctgcacaggaacactcggaatcactggtctcaaacaacaagaaggaaggctttatggctggtttcgacaagcgcgtgaattcctacgccgaggcgctcgacgggctggagaacggcatgaccgtcctggccggcggcttcgggctgtgcggcatccctgagaatctgatcgccgagatcaagcgcaagggcactcgcgatctcaccgtggtttccaacaactgcggcgtcgacggctttggcctcggcgtgctgctggaggaccggcagatccgcaagatgatcgcctcttacgtcggtgagaacgccttgttcgaaaagcagctgctcgatggcgagctggaggtcgaactgacgccccagggcacgctggccgagaagatgcgcgccggcggtgccgggatcccggccttctataccgccaccggctacggcacaccgatcgccgaaggcaaggacgtccgtgaattcaacggccggccgcacatcctcgagcacgccatcaccggcgactttgccatcgtcaaaggctggaaggccgaccgttacggcaacgtcatctaccgccataccgcgcagaacttcaatccgctggccgccgccgccgcgaagatcaccgtggtcgaggtcgaggaaatcgtcgagcccggcgagatcgaccccacccagatccacacgcctggcatctacgtcgaccgcatcatttgcggcaccttcgagaagcgcatcgagaagcgcaccgtccgcggctaatcaaaagaataagagaggaacagaccatggcactgtctcgcgaacaaatggctcagcgcgtcgcccgtgaactgcaggacggctattacgtgaacctcggcatcggcatcccgaccctggtcgccaactacgtgcccgagggcatggaagtgatgctgcaatcggaaaacggcctgctcggcatgggcgccttccccaccgaagaagaactcgacgccgacatgatcaacgccggcaagcaaaccgtcaccgcgcgtgtcggcgcgtccattttcaactcggccgaatccttcgccatgatccgcggcggccacatcgacctcaccgtgctcggcgcgttcgaggtcgacgtgcagggcaacatcgcttcctggatgatccccggcaaactggtcaagggcatgggcggcgcgatggacctggtcgccggcgcggagaacatcatcgtgctgatgacccacgcatcgaaggacggcgagtccaagttgctgtccaaatgcacgctgccactcaccggcgcgggctgtatcaagcgcgtgctgaccgacctggcctacctggaaatcgagaacggcgccttcgttctcaaggagcgcgcgccgggtgtgagcgtcgaggaaatcgtcgccaagaccgccggtgagctggtggtcccagaccatgtaccggaaatgaccttcggctgatccaatgccgataaaggcctcgcggtgcggaaatgcacgcgaggctttgcagaccgtgtgaaaacgtagcgagtgaaggttaggcaggcaaaaacaggcgaggaagcgggctgggctcgcatccgagcctgtttttaacgctgcataaccgagcgcagtagttttcacacggtctgttttcctgttttcagattgaggaaactgccatgcaagacgtcgtcatcgttgctgccacccgtaccgccatcggcgcgttccagggcgcactggccaacatcgccgcgccggatctgggcgccgccgtcatcaagcgcctgctcgagcaaacgggactggaccctgccgaagtggacgaagtcatccttggccaggtgctgaccgccggctccggacaaaaccccgcgcgccaggcctcgatcaaggccggcctgccgcacgcggtgccgtcattcacgctgaacaaggtttgcggttcgggtctaaaggcgctgcatctggccacccaggccatccgctgcggcgatgccgaggtgatcatcgcaggcggccaggagaacatgagcctggcaccctacgtcctgcccaaggcccgcaccggcttgcgcatgggccatgccgagttgatcgactcgatgatcagcgatggtctctgggacgccttcaacgacttccacatgggcatcaccgctgagaacctggtcgacaagtacggtatcagccgcgaggcgcaggatgccttcgctgcctcgtcgcagcaaaaggccgtcgccgccatcgaggccgggcgcttcaaggatgagatcacgcctatcgagattccccagcgcaagggcgagccgctgcgcttcgataccgacgagcagccacgcgccggcaccaccgccgaagcgctggcgaagctcaagccagctttcaagaaggacggctcggtcaccgccggcaacgcctccagcctcaacgatggtgcggcggcggtgctgctgatgagcaccgacaaggccaaggccctcggcttgccggtgctggcaaccatcaaggcctacgccaacgcgggcgtcgacccagcgatcatgggtatcgcgccggtatcggcgacccgccgctgcctggacaaggccggctggtcactggacgagctggacctgatcgaagccaacgaagccttcgccgcccaggcattgtcggtcgggcaggaactgggctgggatgcaagcaaggtcaacgtcaacggcggcgccatcgcactgggtcatcccatcggcgcatccggctgccgtgtgctggtcacactgctacacgagatgatccgccgcgacgcaaagaaaggcctcgccacgctgtgcatcggtggtggccaaggcgttgcgctggccatcgagcgcgcctgacacaggcttattcgtcggcgcagcagttttatgtaggagcaggttctacctgcgaaaaggacgcggccccggctgaaacctcaggtcgcaggcagagccagctcctacagcgcagcggttttatgtaggagcagggtctacctgcgaaaaagggccacgaccctggctgacaacacaggtcgcaggcagagcctgctcctacagcgcagcggttttatgtaggagcaggttctacctgcgaaaaggacgcggcaccggcttaactacgggtcgcaggcagagcctgctcctacagcgcagcggttttatgtaggagcaggttctacctgcgaataggacgcggcaccggctgagctacgggtcgcaggcagagccagctcctacagcgcagcggtttttatgtaggagcaggttctacctgcgaaaagggccacgaccctgggtgacacctcaggtcgcgggcagagcctgctcctacagaagcctttaacagcgacaacccctacaagcagtaataaaaacaaggaccaatccatgctcaatgccatcacttcagcgagtgtgaagctcgtacagcgatacctgccctcacctttcgttttcgcgattctgctcagccttatcgtgctcgccgccagcatgctggttaccggccagggtctgccggccatggccaagcactggggtacgggcttctggaacctcttgaccttcgccatgcagatggcgctgattctggtgaccggccacgccctggccagcgcaccggccattcaccgtctgctagccggcctggcacggacggcgcgtacgccgggccgtgcggtagtgttcgtcacgctggtcgcgctcgccggctcctggatcaactggggcttcggcctggtgatcggcgcggtattcgcccgcgccctggcccgtgaggtcaagggtgtggactatccactgctggtcgccgcggcctattcgggctttctgatctggcacggcgggctgtccggatcgatcccgttgtcgttggccacaggcggcgcggatctggagcgcatgaccggcggtgtggtcaccggcgccatcggtgtcggcgacaccctgttcacccccatgaacctgaccatcatcgccctgctggtcattggcctgccgctcctcaactgggcgatgcacccgaaggatcccaaggtcgccgacccaacgctactcaccgacccggcgcacgagccgctgcctcgcaacacgctggcccagcggatggacgacagccggattctcaacctgatcatcgtcgcgctcggcgtggtgtacttcggctattacttcgccgagaacggcttcgccctgaccctgaacatcgtgatcggcctgttcctgttcgtcggcctggcgctacacggctcgcccgaacgctacatgcgcgcggtgcaggacggcatcggcggcatcagcggtatcgtcatccagttcccgttctatgccgggatcatgggcatgatggtcggggccaacgccgacggtttgtcgctcggcaagcagatcaccgacaccttcatcgcctggtcctcggccgataccttcccggtgctggcgtttctcagcgccggattggtcaacgtcttcgtgccgtccggcggcggtcagtgggccgtgcaaggcccgatcatgctgcccgccggccaggcgctgggcgtggcgccggccgtcacggccatggccatcgcatggggcgacgcctggaccaacatgatccaaccattctgggcgctgcccattctcggcatcgtcggcctcggtgcgcgcgacatcatgggctactgcctgctgatgctggtctattcaggcgtggtgatttccggctgcctgtatttcttcggctgaccccaaacggggctggcgccgcaatggcccagccctggcgccgcggttatcccccttctcccggctaaacgatcccgcgccggagttccttttcggcgtcgggtccgttgccgaacatgcgacaagccgtcgcgctgtcgttctcctggggcctttcgccgctctagcatggcgtttcgctcgatttacccgccccctatccgtccgtccgggcgtgtcacggccagatgagcggtgcaacctttccttacaaatttgcgtcatagttcacagacagagccaagcatccgtgcagtgaaaaggagttaggtctgccgcagcgccgcgcaacgcgggctgcaattggagtgtttcagcgagcgcaccgacagatcgtcgtcgtcgggccgagtgattcatccgtgcaatcgccgttctgttccgaagagcggccgtggatgttcagggataagggaaaggacgatgctcttcaattccgtggtgttcatcgccggattccttccggtggttcttctgggtttcattcttcttgcaggtactggcagacaacgttacgcagccatctggctgacgctggcgtcgctggtgttctacggctggtggaaccctgcctacgtaccgctgctggtcggcagcatggtggtcaactacctgatcggtggctacctgatgcgacgcccttcgcgggcggcgctggtgctcggcgtcgccgccaacgtggccttactcggctactacaaatacaccggttttttgttcggcagcctcgatgcagcctttggcctgggctggtcagtgggcgagatcgtcctgccgctggcgatttcgttcttcaccttccagcagatcgcctatcttgtggatgcccatgacggtgaggtaaccgagcacgacttcgtcaactactgcctgttcatcagcttcttcccgcagctgatcgcagggccgatcacccaccacggcgagatgctcaagcagttcaatgactcgagcaccttccgcccgcgcatcgacaatatctcgctggggctcacggtattcctgctcggcctgttcaagaaggtcatcatcgccgaccccttgggcgcgaaaaccgcgccgatcttcagcatcgccagcgacggtatcgttccggcgttctacgacgcctggtttggtgccctcacctataccttgcagatctacttcgacttttccggctacagcgacatggccatcggcctcggcctgttgttcggcctgcggctgccggtcaacttcaacagcccgttcaaggcgcacaacctgatcgactactggtcacgttggcacatgaccctgacgcgctttctcaccgcctacatctacaaccccatcgtcatgcgcatcacgcgctcgcgcatggccgccggcaaaccgctgccgcggcgcggcaagatgagcctgagcaccttcgtcgtgctggtcgcctatcccacggtgctgaccatgttcatctccggcgtctggcacggtgccggctggcagttcgtggtgttcggcctgctgcatggcttctatctggtggtggcccacggtttccgcgcgttcaaggcacgcaagggcctgccaatggacagtgacaagcccctgtatcgcgccgccgccgtcttgctgaccttcctttgcgtagtcgtcgcgatggtgttcttccgcgccgacagcgttccgaccgccctggcgatgctggcgggcatggccggcctgagcgagctgagcactgacttcgacaagtcagactacgtcccgatagtgctgcttatggcattcgtctggctgatgcccaacgtgcagcaatggatggcgcggtttcgcacctcgctggatgcccaaccgcgcgagcactggctgctgcgttggttcccgttcgcgatgtgggccccggcgcccgccgtggggctggccatcggcgtgctgggcttctttgcattggccgtggcgttttccgtggccccaaccgagttcctctacttccagttttgatattcaaggagtgcaagcctgatggatcagcttctctggctaccgcaacactcggacctcagtgccgccatcggcgaggccaagcgcgaaaccgacccgatcgcacggctggcccaagccacacgactggccggctaccgtcgcgacttcactcagaccacacgcctggatcggctggccagcgaaggcttgcaggcgctgaccaacagcgagacgccaacaccgggactgcgttcgctgcgcatcgcactgctggcctcgcacaccgtggatcacctggtgccggccattcgggtcgccggtttgcagcgccgcctggccatctcggtgcatgttgcgccgtacgggatgtatcgtcaggcactgctcatggaagacgccgagctgacccgcttcgccccgcagttgatcgtactggcgctcgacgctcgcgatgcgccactacagctccccctcgaagcctcgcaggcggaggtcgacgccgcggtgaccggccgtgtcgacgagttacgcctgctctggcgccgtgcgcgcgagcgctacgccgcgcaagtgctgcaacaaaccatagtgccggccgatccgccgctcttcggctcgttcgacgcattggtaccggcctcgccctgtgccgtgatcgaacgcttgaacgccgcgatccgcacagccgcccgcgaagacggcgtactgctgatggacctggcctgggaggcggcacgcgggagctacggcgatggtctggccgaaccggtgcgctggcatcaggccaaacagctggtcagtcccaacctcgcgccgctgtatggcgaccagctggctcgcatcgccgcggcgagcgtcggcctgtcgcgcaaatgcctggtactggatctggacaacaccctatggggtggcgtgattggcgacgacggcgtcgacagcattcaccttggccagggctcgcccagcggcgaagccttcctggcctttcaacgctatgcggccctgcttgcacggcgcggcatcatcctggcggtgtgcagcaagaacgacctgagcgtcgccgaagccgcgttcaaccatccggaaatggcactcaaacgaggcgacatcgccgccttcgtcgccaactgggaagacaaggccggaaacctgcggcgcatcgcctcgatgctggatatcggcctggacagcctggtgttcgtcgacgacaacccggccgagcgcgacatcgtgcgccgtgagctccccgaggtggcagtgcccgaactgccagacgacgttgccgactatcccgcacgggtggcggcggccggctacttcgaagccatgtctttcacctcggacgacgccacccgcgggcgcaactatgcgttgaacgccgagcgcaaggccgccatgagccaggcgaccgatatggaaggctacctgcgcggattggaaatggtgatgacggcaacccggatcggcgccgccgagctcacccgcagcacccagctgatcaacaagaccaaccagttcaacctcaccacgcgccgctacagcgaggcggaagtggaacgtatcgccaacgaccccggcgcggtggcgctggccatccggctggccgacaagttcggcgacaacggcttgatcaccgtggtgctggcgcgccccgacagccgtatcggcgcggatgaattgctgatcgacagctggctgatgagctgccgggtgctcggccggcaagtcgaagacgccgtgctcgaggtgcttgccagcgccgcagccgcagccggttaccgcgcgttgatcggcgagtaccgccccactgagcgcaacggcatggtcgccgagcactatccgcggctcgggttcgcccagcacccgccactggccgatgcgacaagcgacgccaccttctggcgctacgcgctcgactgcacccgcaccccccgtcatttcatcgaggtatcagcatgaccgaagcagaagttctcaagaccttgaccccggtttttcacgacgtgttcgatgacgacagcatcgttctctcaccggaaatgaccgccaacgacatcgacggctgggacagccagacccacgtgatgctcaccgtggcggcggaacagcgcttcggcatcaagttccgcacggccgagctggagtcgctgcgcaacgtcggtcatttcgctcaggtcatcagcgccaaactcgaaggaaaatagccatggcccataccgctgactaccccaaggacggcagcaccctcgaaaatggaaaggcacgcacggccagcgcgccgggccaggtgcgtccgcggtatttgctgtcattgttttccggcctgttcggggccctggtggtgttctgcctgacactcttggtgctggaccgaaccggcaacctgccgccaccagcgttctcgaacatctcctgcgccgacgagaagctcagcttcatgcgcggcaacccgatccaatcgccgaacttgctgataatcggctcgtccgtcgcttggcgccacgtcgacagcaacgtactgatgcaggccatgcccgacgtgcgcccaatgaacggcgcgttctgcggccttttcgccaaccagtcgacctacgtcgggcactggttgctcgatcgcgagcccagcatccgcagcgtcgtgatgattgccgatccgcaggacttcgccggttgctggcgagtccccaccgccgtgttcaaccgtgagcacgtcgatccgtacgtttatgaaaacgcatccccctggggtcactacctgcgctatttttcgccgaagtccttgctgcgaaacgcgctcacgatcaaagcgcagcgggccggagagatcgaatgggatccgctggttttcaaccggttcggcgacggcccgctggttaccgccaacactcgcgaactcctgtacggtcgcccggagccgctcgatcgcagctgcttccaggcgctgcgggacatgggcacacgcctgcagcaagagggacgacagctgatggtggtctccactccactgcaccctaagtggaaagaaaagtacgacccggacggcaccttcctggctgacttcgaccaacgcatcctggacgcactgagcaccagcggcggcagctactggaacgccgacaaggactggagcacaccggaggcctcgttcgtcgacgcggttcacatgcgctggtcggcggcccaggaatttactgccgcgctcgccaagcagatgaggagcgcggcaaccggccccgcggagtcgctggaaaccgctggggtaccttgatcgcgaatgcaagaaatcgtttacggctcgactggaaggggcactttttcgcggtcaagaccgctcccacagacggtgtgcggttgccagtgcgacagccgggccagttagcgccaacctcagcgtgaagcgggcaacaccctgccgcgacactcgccaaagccgatcgatgcgtagccctcacgctgacagcgcgccctgaagatgatctcgtcgccgtcttcgaggaaggtccgggtttcgccactcgccagttccagcgcctgcttgccgcccacggttatctccaacaggctgccgcagctatcggtggtctcaccggacagcgtgcccgagccgaacaggtcgcccggttgcagactgcagccattaacgctgtggtgagcgaccatctgggccacggtccagtacatgttgcgcgtgctgctcaaggtaatgcgttgcgctggcaaccccttgtcgcgcatcgcctgggtctgtagcagcacctccagttcgatatccagcgcgccctgctgctgatctcgttcgtcgaacagataaggcagcggttgcgggtcgccttcgggacgcgtgggctgcgcgcagcggaagggttccagggcttcgggcgtcaccacccagggcgaaacgctggtggcgaaactcttggaaagaaacggccccagcggctgatattcccaggcctgcagatcgcgcgcagaccagtcgttgagcagacagaaaccggcgacgtgcgcgcccgcctcgctgatcggaatggcctcgccacgggcattaccttcaccgatccagatgcccagctccaactcatggtccagacgcttgctcggaccgaagctcggctcggtggcacctggcggcaaggtctggccattgggtcgtttgaccgtcgcgccggagacatcgatcgtcgatgcgcgaccgtggtagccgatgggtacgtacttgtagttcggcagcaagggattgtccggacggaacagtttgccgacgttgttggcgtggtgaatgcccacatagaaatcggtgtagtcgccgactttggccggcaggtgcatccggcactggctcatcggctgcaacagggtctcgcccatgccttgcaggcgctcgcgctgctcgctgctctcgacgagcaagccttgcagggcctcgcgcaacgcgttgcgtgccgatgcgcccagcgcaaagtatgcgttgaggctgctggcgctggcggcctttgcggcttcggccgcgcgcccttcgaacagaccggcctcgcaggccgcgctcaggtcgaaaatgtagtcaccgatcgcaacgcccccgcgtggctgctcgccgtcccggctgaagacccccagcggcaggttggcaagggagaaatccgaatggccgttagccgattcgacccagctgcatggttgtgtctgtgcgctcatgtcagttcccattcttgtcgaaagtcttggtcaggcccgcccagcagctgtcgtagtcgtcctgcaacagcgggctttccagcgcctggcgtgttggccgaagcacctggccggtttcgaacatgaaagccatggtgttctcgatcttgtgcggtttgagttcggcattgatcgcctgttcagtggacacgtgatccggcccgtgagcgctcatgcagttgtgcagcgaggcgccacccggtgagaatccatcggccttggcgtcgtaggcgccggcgatcagccccatgaattcgttcatcaggttgcgatggaaccacggcggccggaaggtgttttccgccaccatccagcgcggcgggaagatgacgaaatcgatgttggccatgccatggatggcactgggcgaagtcagcaccgtgaagatggatgggtccgggtggtcgaagctgaccgtgccgatggtgttgaaacggcgcaagtcgtatttgtagggcacgttgttgccatgccaggcgaccacgtccagcggcgagtgatcgagctcggtcgcccagagttcaccgagaaatttttgtaccagctgcaccggttcgtcgcgttcctcgaactgcgcgacgggcgcgaggaaatcccgcggattggccagcccgttgctgccaatcggccccagatccggcagtcgcaaggcgcaaccgtggttctcacagacgtagccgctggcactggcgtccagcagctcgacgcggaacttcatgccgcgcgggatcaccgcgatctccagcggcgccacgttcagcacgcccagttcggtgaccagcctcagcgtgccctgctgcgggacgatcagcagctcgccatcggcatcgaagaacacccgctccatcgactggttggccgcatagcggtaaatgctcgcgcccgtcggctggttcggctcgccgttcgcggcgacgcacatcaggccgtcgatgaagtcggtcgcggcctcgggcagcggcgccggattccaacgcaggcgattaggtgtgaccgcgcccagagccgcattcagctggcgttccagtcgctggtatttaccgtggttggccgaaggccggatgcggtacagccaggtccgccgcgcctcgctgcgcgggacggtaaaagctgtacccgaaagcagctcggtgtagagcccgtacggcaccttctgtggcgagttctgccctaccggcagtgcgccgggcaacgcctcgctgctgaactcgttaccgaagccggacaggtatcgatgagcctgtgggtcttgttcttggataggcatggcgatctctcgatttgcgtaatcggtttacgcaaaaagtaatttgaagtcctcccatcgtcaagctataaacagcgcctttatcaggcaggcagtcgagctcatggcagatagcaacgcgcaaccagcgccacggcggcagaaagtgcaggctgccgaagtgggaatggacatcctcacggcgttggccgaactggcgccggcgacttcgctgtcgcgtctgtccgagcacgtcggcatgccggccagcaaggtgcaccgttatctgcaagccttgatggcgaccggttttgccgaacaggatccactgaccaatcattacgggcttggccgcgccgcgttgttcgtcgggctggcagcgctcggtcggctggacgtggtcaaactggccacccctcatctggtacaactgcgcgacgaactcaacgagacctgctttctcgcggtgtggggtaaccggggcccagcggtggtgcacgtcgaacaagcggtgcgcgcggtcaccctcatcacccaggtgggctcggtgctgccattgatcgggtcgtccacgggcctggtattcaacgccttcatgccaaacgccgaaaccgccgagctgcgcgaagcggaaatgaagctgccctccgccccctcctccgaggcgctgctcgcgacgatgaacgagctgcggcgcacgcatgtccagcacgtgcacggcctgctgatggccggcgtcaacgcgttgtccgcgccgctgttcagccatggccagcggctggcaggcgtcatcaccgtcgtcggcgcggagcccggtttcgtggccgagccaggcggtcgcgaagcgcagcgactgctgcaggtcgccggggaaatcagcgctcggatgggcgctgaggtttaggccagatctggcacagcgtgaccaagcagcagcgtgacgagcgcggcgtgtggcaagcctgattgccgtggctgcgcccggagctggccgcctgcgcctatggactctgtagccgcctttttccgaacggcccgttggcggctatttcttccctggccttttctcagcggtccttcattgatccgtgcaggtgcgacaatctgacctgacagtcacatatcgattgcgttgcaaaattgcggctggaattttggaacccatcgaatggccaagcgctcggtctcgccacaacagcctcaccctatcaatggcggggatttcaggccgggctctgtttcctatgttctggtcgcctacagcgaaccctggcgagcggaccagatggcccagctgatcgaaaacctggcgcccagaacccgggtcatccaggtgcatgacggccattcggcgctggccgcctgccgacggcaaacgcccggcctgttgatcgccgacggcgaactggacgagctggatgggttctcgctactggcccaactacgccaagccacctctacccgcctgctgccgtgcatattgatcagccaacggctggatgcccatagcgtaagggccgcccgcccgctacggccccacgcctatctgggcaagccctgcaacctcgacggactgcagcggcgcctgctgacactgttgccgcgagcgacgcgaggcctgcatacacaggcggatccaccgggccccgacctggacgcgttcctcgagcgaatgcgcaacaacaaccgcggagccccaatgctcgaagcggtccagatcgcgattcaggaatgcctgagcgccgacgacaaggatctgggcgttatcgaggcgcagctctcgaaagatccacaggtcaccgcgcggctgattcaactcgctaacagcgccgcgcagcatctgccagtcgctgtcccaggcattgccgaggctcggcctcaagcgtgcactcaatctggtcctggccatggcactgcagcacagcgccatccttggcgacgaacgtctgtcgcgccgggccgccaccatctgcgcggaggcccaacgcgcggcgcagttagccgagtggctcgcgcgcaaggccaggctcgacgtcgagctctgctataccgcagggctgctgcacaacattggagagcttgcgctgctacgaacgttgcaggattggctcgacagcggtgaagcgctcgacgaagagcgggtcgagtcggtgctcagcgggtatgcggccggtttcggatcggccttgcgctcgcggtgggcgctcccgcttcagttgcgccaggccaccaccgccttctacgggctaggcgccgatgtattcagccgcgaagcgctggtgttgaacctggccggaaccttgatgcgcctgccgccggatcgaaccccggatagcctgcgtgacgaacgtaccgtgaggctgcttcggctggatgcagcgatcctcgacgaagtcgctagcgcggtgccagccgcaggttgatgcctcgcgccagtcgcgctgcgcccactgccatgcgtggtcaggtacgcgcttcgacctgtccggcctggatgtcgcttgcagcgaccacgcgattccttccacgctgcttggctgcgtacagcgccttgtcggccttgttgtaaaaggccgcaaagccttcgccggctgcaagctgcgcgacgcccaggctcgcggtgatggtcaccgtgagctctcccgacgagacagcgccttgcgcaatggaatgcctaagccgctcggcaatctccatcgcgtccgcttcggttgcgcgtggcatcaataccgcgaactcctcgccgcccaggcgggccaacacgtcgccggcacgaagtgcgcgctggcaggatcgagccaccatccgtagcgtctcgtcacccaccggatggccgtagtggtcgttgatgcgcttgaagtaatccaggtcgatcagcgccagcgacaacggctgaccatggcgagccacgttgctgatctcgacaccaaccgcctcggtgaagaatccccggcttttggcgccagtgaggaaatcggaggtggccagccgctcgagctcgcgtcgcgtcaggtcttcgccgatcatgctgccgatcagccgtgccaccagccttatgagctcgccatccctgcggctcgtgtcgtcccatgcgggcgtgttgaagacgaagccaaccgcaccatggcgcgacccgccgatcaccaccggaacggctgaaacggcatagtccgtgtcatgcatgtacaactgcgaaatcgacacgaacgagcgcaactccacggcggtcgcatcgtgctgggcttcgtgcagggccgcagcgaacagctcgctcagttggctccggtccagcctggcgcctgtggtcggcgatgcgctgcaatggctcacgctccagccgtcggcctccaggccggcatacagcgcatagtcagccgccagatactcccggcttaaggtcaaagcagcgtcgattcgctcgttgagcgaagccggtttcactgcgatgtcgttcagcgtgcgcagcccttgaataagcgccaacaagcgattgcggaaatcgaactgcaaggaaatcgatcgagccagcaacccggcgccgagcatgaccaggagcgagatgccagcagaccatcccttataccgctcccagcgctggtggtgctcggcgaagacatcctcgacatcgagggcgactacgactgattgtgacagcgccgccagacgccggtagacgtagatcttgggccggccgtctatcgggctgagcgcctggaagctgccgttgggccgcgagcctggctgcacgaacggcaagctggccggaagggtgacgccgatcgcgtccgattctgccacttgcccgcttccgcgcgctctcaggacgccatccgtgccgaccagcatgatggcgctgtgctcgcccaggtgcacgccatcgaaaaaccgcgaaaaataggccggggccagcgatatgaccagtacgccgaccaacgtctggccgtccctgataggtcgcgtgacctgaatggtattccgcccggatacgcgaccggtcaccggtttgctgatatgcaaggtgtcttgtgtcgacgcgcggtgcactttgaagtgttcgcggtcggaaagatcgatcgcctcggtcgccggccccaggctggagtatcgcaacaggccgtccgcgccgatcacggcgacctgcatgagcaggtcgttgtagaacgcactctgcagcgctcgtacgcgttcgtcgaagtgcactgggccccgctgccattcggggcgcaacagcttcaacgccgtatcggcgtcatgaaatgtactggcggcgttttcctggaatgccagcgctagattcgccgcttcgtccactgccttctgttcgatgaagtctcggttgcgctgttgctcgatcagaagaacggaccagatcaaagccaccagcacgaacgcgattcctggaatcgttgccggatgggaaatgatctttccgagcgagggattcgcagacagcggcatgctttcaccgatttagtagcctagtgccactagcataacgtagctggactgccttcctaagcacgatcctccatcgcattagcgggtatcacagccaaaacgctataagcgccacggccgccgtgcccatcaaactggtatcgccgcaacactgggcacacttccggctgctcgcagaacgggagctcccgggcgctcgggccgaccagcgctaccctgcggcaacgccttaacagttcggccgacgcccgccgacaacgatggtcatctaggaggctcgacacccagcacccgcatgcggcgatacaccgtggggcgggacacaccgagttcccgtgcgacggcgctgacgttccagtgttcacgacgcagcagctcgcgcagcgccaaagcaggctcgggctcgggcaccgcgtcgccggcgtcgtcacggcagcgcgccagaactcgtggcaggcactcgtccggcaggtcctggacggtgatctcgtcttcttcgcaggttgccagcgcatactgcagcacattgcgcagttcgcggatgttgcccggccaggggtaggccagcagcgcactcatcgcatcgccgcgcagatgagggttgcccgggcgcccttcggccagctcggcgaacacgcggtcgatcaggaacgccttgtccgcccgctcacgcaacggcggcagcttcagcgacgcgccgttcaggcggtagaacaggtcttcgcgaaacgccccgctctcgaccatctgccgcaggtcgcggtggctggcggcgaccacgcggatatccactttcaccggcttttcagcaccgagcggcatcacttcctgctcggccagcacgcgcagcaatcgggtctgcaaatgcagcggcatgtcgccgatttcgtcgaggaacagcgtgccgccgtcggcctgctggatcagcccgcgcatgcccttgctgcgcgccccggtaaaggtgccgggggcgtagccgaacagctcgctttcgatcagcgattcgggcatcgcgccacagttgatcgcgacgaagggcttgctgcgtcggcagccgctttcatgcagcgccttggccaggcgttccttgccggtgccggtttcgccattgagcagcacgttcagcggttcgctgcacaggcgtttggcgcgggcaagcatcttgcgcatgaccgggtcgtcgtcggccagggcatcgagcgcggaatgcccgccgggcatgctgcgctcggtcggctctgaaatctggcgacgcggctccatcaaggcagcgaagaacagctggtggcggtgggtacggaaggcacggacctggtcatggctggcgtagggaatgctcagcacatcgttcaactcgcagtcgaacagctgatcgatccgcgcctgcgccagcgtgccgaagggcccctgcgtcatcagcccgtgctcggccagcaggccgcgcgcggcggtgttgccggccagcagctcgccgttgtcgcccaacgccagcaggtaacggcggttgatcaggacgaactcgcgcgaaccgtcgaagccaagaatcggccggtcgcggtaaacgcgcatgaagtaggcatcctcgatcatccgtgcgtactgcttgaccagttgcagggcgaaggtctgcgagtccttcgtcggcggcgaatgcagcgctgaaatgtcgagcacggccagcaattgcccctgcgggttgaacatggggactgcggtgcaggtgagattggtgtgccagacgctgaaatgatcgtgctggtgacaggtcagcgcctgctgttccttgatgcaggtacccaccgcgcaggtgccggcatggtcttcgccccagtccgagccgaggaacaggccggtcttgcgatgggccttttcatccgccgggtcgccgagaaactgtacggcgatgccgcggttgtcggtcaggaggatcacgtagcccagctcggcgatctgccggtagagctgctcgacgccggcacgggcgacgttgatcagctcgtcggcctgatcctgatgctcgcgcagcacttgccgcggaacgaagcgcgcttcggcgggacgcgctgggtccagtccatagtcatgtacacagcggcgccacgagcgggcgatgatcgggtcgcgatcacccggcaagtgcggcgcattggccaaggaaagcaccgcgtcgatatgactgacgggaccggacagcatgttcatgcactctcctcgaagcactggcatcggctcgatgccagtgcttccggcataacgttttattgttgttcaacgatgttcaggataaaccattgagagggtctggccagcctaaactttggatgtatgacccggcgctattcgtagcttattcagggtgtaaagcgctttacaacgctttacaggtgtaacgccgaaacagcgttacaggatggttacagccgagtgattcttaaattagatttccttttgaatcattaagttagtcatataaaacggaacattaaaaagttggcatgacaactgctcgatctattttgcggaacaactctcgcataacaagataaccgcagcctgattgacatcagaactgctggtaataacaggagtcatgtcatgcataattccctaggcaagcacgacacgcttaacaggcggcgctttctttccctctctggccagtccctggccgtcatgggcctggctcagctcatcccggtaaacctgcttgcagaggaaaagctgccggatcttcccgaaggcctgttgcgcatgggccgggacatcttcccgcacgacttcatcagcgaccgccactacatagaaccgctgctcggactggtggacgaacaaccagacctggtcgccagcggcctgagccaactgcaaacgcgtgcgagtcaggcgcacgaggcgcgcttcgagcagcttgccgaggccgatcgggtcgttctgctgaccgaaatcgaaaccacccccttcttcaaggccgtgcgcagcagcctgatgttcggcctgtacgacaacaaaaccctgttcccgctgttcggctacgagggctcgtcctgggagaaaggtggctacgtcaatcgcggcttcgacgacatcgactggctttgaacgacaccaccttcccgcccgaacgggaccacaacaaaaacaagatgaggaataccccatggcaactttcgctcaggacgacgatggcgtcgtggtgatcatcggctccggcgcaggcggcggcacgatggccaacgccctggccaaacagaagatacgcagcgtcgtgctcgaagccggcaagcgcttcagcctggaagatatcgagaacgacgagtgggcgatgttcaagaagatctcctggctcgacaaacgcatcgccgcaggcggctggcacctggccgagaacaaccccaacctgcccgcctggatcgtcaaggcggtcggcggcagcacggtgcattgggcgggtattgccctgcgctttcgtgacttcgaattcaagatgcagagcatcaacggcgacatcgccggcgccaacctgctcgactggccggtgacgctggaagagatggcgccctggtacgagaaggccgagaaacacatgggtgtgaccgggccgagcaccggcatggcctatcacccgtggcacaactccttcaaggtgctggccaccggcgccgagcgcgtcggctacaaggagatcctctccgggccgatggcgatcaacaccgagccctacgacgaccgcgccgcctgccagcagatcggcttctgcatgcagggctgcaaaatgggcgcgaagtggtcgacgctctacaccgacattccccgcgccgaggccagtggctactgcgaggtacgcccgcagtcgatggtgctgcgcatcgagcacgacgccaagggcaaggtgaacgccgtggtctacgccgacgcccagggcaacatccagcggcagaaggcccgggtggtctgcgtggcaggcaactccatcgaatcgccgcggctgttgctcaactccgcatcctccatgttccccgacgggctggccaactcctctggccaggtcgggcgcaactacatgacccacaccaccgccggcatcttcgcggttatgcccaagccggtgcacatgtaccgcggcaccacctgtgccggggtcatctccgacgagtcctacaacgacccttcgcgcggcttcgtcggcggttatcgcctggagattctcgccctcggcctgccgttcctctcggccttcctcgacccgacgcccaagggctggggcaagcagttcgcctcgcgaatggagaactacgaccgcatgtccggcgtctggctgtgcggcgaggacctgccgctggagagcaaccgcatcacgctgcacggcagtgaaaaggaccagtacggcctgccgattccggtggttaccaagagcgatcacccaatggatgccgccatgcgcaagcacggcgtcgccaccaccgcgaagtgctacgaggccgccggcgccaccgatgtcatcgagctgccgccctacccggccagccacaacatgggcaccaaccgcatgagcgccaaggcccgtgacggggtggtgaacaagtggggccaaagccatgacatccccaacctattcgtctccgacggtagccagttcaccaccagcggcggccagaaccccaccctcaccatcgtcgcgctggccctgcgccaggccgagcagatcggccggctgctcaacgaacgcgcgatctgaccactacttcaagggagtcgaccatgacccagcccaaccagtcgcagcgcctgtggatgtacgagcagatgctgaccagccgctacatggaggaatccatcgagcgcatctacatggaaggcaagacgccggtgttcaacatggccaaggggccgatccccggcgagatgcacctttccaacggccaggagccctgtgccgtgggtgtctgtgcccacctgaacgccgaggacatcgtcaccgccacccaccgcccgcaccacattgccgtggccaagggcgtggacctcaacgagatgatggccgagatcttcggcaaggccagcggcctgtccggcgggcgtggcgggcacatgcacctgttcgatggccgggtgaatttctcctgctcggggatcatcgccgagggcatgggcccagcggtcggcgcggcgctgtcgcggcagatgcagggcaagcccggcgtggccgtctcctttattggcgagggcgcagccaaccagggcgccttccacgaaacgctgaacctcgccgcgctgtggaagctgccggtggtgttcgtcatcgaggacaacgcctggggcatctcggtggccaaggcgagcgccacctgcatcaagcagcaccacgtacgcgcggcggcctacggcatgcccggcgtgttcgtcgagaacaacgacccggatggcgtgttccgagccgccggcgaagccatcgagcgcgcccgtgcaggcggcggcccgaccctgatcgaaatcgagacctaccgcctggccggccacttcatgggcgacggcgaaacctaccgccccgagggcgagaaggacggcctgatgaagaaggacccgatccccggctaccgccagcgcctgatcgacgaaggggtgatgagcgaggcgcaggccgaagacatcgccgcccgcgcgcgcgggcgcatcgacgaggccatcgccttcgcccgggaaagtccctatccgcgccccgaagaggcgatggaaaaggtgttcgtgtaaggcccatgaaccgtaggagtgggcgtgctcgccaggcaccggagccaccgtttcgcgatcgagatcgctcccacaaagcggcacgcggcaaaccgagacctgtaggcgcgagcttgctcgcgaacggacacccgagccaccgattcgcggccagggtcgctcctacaaaggcggtacgcggcaaaccgagacccgtaggagcgagcttgctcgcgaacgggcatcggagccaccgcttcgcgatcgagatcgctcccacaaaaagcggcacgcggcaaaccgagacacgtaggagcgggcttgctcgcgaatggacacccgagccaccgattcgcggccagggtcgctcctacaaaggcggcacgcggcaaccgaaacctgtaggcgcgagctcgctcgcgaacaaagtcagccagaacaacaagaggaacgccatgaatagccaagccaccatgaccgccgccgtctggcacggtcgcaaggacatccgcctggagcaagttgcgctgccgggtgcgccgcaaccgggctgggtgcagatccgcgtgcactggtgcggcatctgcggttccgatctgcacgaatacctcgcaggcccggtgttcattccggtggacgcgccgcacccgctcaccggcatcaagggccagtgcatcctcggccacgagttctgcggcgagatcgtcgccaccggtgaaggcgtcgaaggctacgcgccgggcgacaaagtcgccgccgatgcctgccagcattgcggccagtgccgcttctgcaagaccggccagtacaacctctgtgaacagctggccttcaccgggttgatgaacaacggcgccttcgccgaattcgtcaacgtgccggccgaattgctctatcgcctgcccgaaggttttccgctggaagccggcgcgttgatcgagccattggcggtcggcatgcatgcggtgaagaaggccggcagcctgctcggcgaaaccgtggtggtggtcggcgccggcaccatcggcctgtgcaccatcatgtgcgccaaggccgcgggcgccggtcaggtcatcgccctggaaatgtccgccgcgcgcaaggccaaggcgctggaagtcggtgccaaccgggtcgtcgaccccagcgagtgcgacgccatcgccgagatcaaggcgctcaccggcggctacggcgccggcgtctccttcgaatgcatcggccacaaatccaccgcgaagctcgccatcgatgtgattcgcaaggccggtcgctgcgtgatggtcggcatcttcgaggaaccctcggaattcaacttcttcgagatcgtcgccaccgagaaacaggtgatcggctcgctcgcctacgccggcgaattcgccgatgtcatcgccctgatcaccgacggccgcatggacgtcaccccgctgatcactgggcgcatcggcctggacaacatcctcgaagagggcttcgaggagctggccaaccacaaggaccgcaacgtcaagatcatcgtcagccccagcgcgctggccggctgaaaaggagaaccccatgaccactgccacaactgagaaaaagctcaccgtcgcccgcgccatggccgctgccgtggcgcaggagatgcgcctggacccgaaggtgttcgtgatgggcgaggacatcggccagctcggcggcgtgttcggcaatacacgcgggctgtacgaggagttcggcaaggaacgcattcgcgacacgccgatctccgagaccgctttcatcggcgccgccgtgggcgctgcctcggacggcatgcggccgatcgtcgagctgatgttcgtcgacttcttcggcgtctgcatggatgccatctacaacctgatggcgaagaacacctacttctccggcggcaaggtgccggtgccgatggtgctgatggcctccaccggcgccggctactccgacgccgggcaacactcgcaatgcctctacggcaccttcgcccacctgccgggcatgaaggtggtggtgccgagcaacgcctacgacgccaagggtctgatgaccgcggcgattcgcgacgacaacccggtggtctacctcttccacaaggcgctgcagggcatgggctggttgggcaccgagaaaggcgccacggtgccggtgcccgacgagccctacatcgtcgagatcggcaaggccaagaccgtccgcgaaggccgcgacgtcagcctggtcagccttggtgccggggtgcatcacgccctgcgcgcggctgctcagctggagaaggacggtgtcagcgccgaggtcgtcgatctgcgcagcctggtgccgctggaccgcgaacatgtgattgcctcggtcaggaaaaccggccggctgatcgtgatcgacgaggactatcacagcttcggcgtcagcggcgagatcatcgccagcgtcgtcgagcacgacatcggcatgctcaaggcccgcccgcagcgggtggccttccccgacatccccatccccttcaccccggtcatggagcaatgggccctgcccaatgccgacaagatcgtggccgcctatcacgccatgcataaggaatgacagttatgagtacccccattgtgattgcagacgacctatgggaaggcgacgccgaagcggtgatcacctcctggctggtcagcgacggcgccgaagtggccgcaggtgacctggtcgccgaggtcatgtcggaaaaggcccagttcgagatcgaggcgccggtcgccggcgtgctgaagatcctcgaggaagaagacgcggtgatcgccaagggtgcggtcatcggccaggtggaatagccatgactcaactggagaatctgcccgagcgcgcccccgaacgggtgccgctcaagggcatgcgcaagatgatcgcggcgaagatgcacgaaagcctgcagaccaccgcgcagctgacccaccacagcgaatgccggctggatgcgctgaaaacccgtcgggccgaactgaaagccgagggcagcgcggtctccgtgcaggacttggtgctgctcaaggtgatcgaaaccctgcaggcccatcccggcctcaatgccacgctggaagacgaggtgatccaccagcacgcggcggtgcacctgggcctggccattccgctgccgggcgatctgctggtcgccccggcgctgttcaacgccgagcagctggatggcgaaggcctgtgccaggcgcgcaaggcgctggtggacaaggcccaggccggcaaactgtcggtcaaggaactgaccggcgccaccttcaccgtttccaacctggggctgtcgcgggtgcaccacttcacgccaatcctcaaccctccacaggtggcgattctgggcgttggcggcattcagcggcggctggaactcgggccgagcggcaagctggtggaagtcgagtggatgggcctgtcactgaccttcgatcaccgcgcggtcaacggatcgccggcggctgagtttctcgatgatctctgccggcgcatcgaggagcaagcggcatgaacggcatcgcccggttcagcgtgggcgccggcctgaacgccgagcgggccttgctgcagcgcgtctgcgacggcctgttcgactgccagctgctgctctggcggccgaccggccaggcattggtgatgcccggcagcttcgaacgccggcccggtttcgccctggccagccaacgctgcgcggcgcagggctggccgatcctgttgcgcgacaccggcggcgagccggtgccgcaatcatcggcggtgctcaacgttgcactggcctatgccctgccggccggtgacgaagccggcaagcgcatcgacgtcgcctatgagcggctgctcgaaccgctggcgctttggctggcggagaacggtctcaaggccggagtgggcgcggtgcccggcgcgttctgcgacggtcgcttcaacctcaccctggagtctcgcaagctggccggtaccgcccagcgctggcgacgcagccgtgatggccgctcggtggtgctggctcacgcggcgctgctggtcgaggactggcgcgaagccatggccgatgtggtgaaccgcttctaccacgcctgcgccagcgacctgcgctgccaggccgaaagtcacttggcgcttggcgagcggctggccgatccctgggcaaccgcggcatcgctgcccgagagctatcagcgcgtcctcgcctggcagggcctggaactcggcgcccgcaccacctctccgcccgaaggcctcaccgccggacggcactcccccttgctttgaataacaacaacacggcaggccatccggccccgccatgcatcggaggaaacaccatgaaccatcccacccccactgcgcccaaaggcagcctgcccggccagcgcggcatccagcacttcggcctgaccgtgccgaacctcgaggaagcggtgagcttcttctgcgaggtgctgggctgcgagccgttcttcgagctcggcaccttcgccttcgacgacgactggatgaacgagcacctcaacgtccatccgcgtgcagtgatcaggaatttccagatgctgcgctgcggcaacggcaccaacctggaggttttcgagtattcagcgcccgaccaggccggctcaccaccgaaaaacagcgacatcggcggccatcacttggccttctacgtcgacgacatggaggcggcggtggccttcctgcgcgaacgcggcatccgtgtgctcggcgagccctcgacctttaccgaagggccgggcgagggcctgacctgggtctatttcctcgcgccctggggcctgcaactggagctggtcagcttccccgagggaatggcctacgaacaaggccgcgaacgcctgctctgggacccacgctcctcggcacgctgaaccgagcgcatacagccctggtacgcacgggcgttggcgcggagcttcactgcagaagggtcgcaacgccaccaaaaccggcaacaaaagcgcaacgaagccggacctgtagttataaacgtttaaataacaatcctgaaaagcagtgatatacgcgcacatcatgttgctcgctactaaagggcgcaacagcgaaagtcgtttacaaataaaaaaatatcagaagagctttaccagtgaatgctcgcttgaggcatgcctgaagcgagaacaaaccctaaacaggaaataataaaaatgaacttaaaacagtcaaacctaagggttcaaatgatcatggcggcctcgctttatgcgattacgccactgcacgcatcagacagagccattacggataaggaattgtctgatgaatccaatactgctgattggctggcttacgggcgaacacattccgaacagcgattcagccctctcaaagacatcaatgtagacaacgtcagcgggctgaagcctgaatggtacgcgccgctgccggaccgatccgatatcgtcggaacgcctttggtggtcgatggcgtcatgtactacgtcggtgaaatgaacaggacacgtgcgttcgatgcacgcactggcaagatgctttgggaatacgatccgcaagtttccaaagagatcatcgacaacaacatgaagaaagtgttctggaagcataaccgcggcctttcgacctatggtgacaagctattcatcgccacctgggacggccgtctgattgcgattaccagaaaagacggcaaggaagtctggcaaacccgaacctttgaccatgaccagccgttgaacattaccggccatcccaaggccttcgatggcaaggtatttgtcggtaatggtggaacagaacttggcccgatgcgcggttatgtgaccgcttatgatgccgaaacgggcaaacagatttggcgtttctatatcgttcctggcaaccctgccgatggattcgaggatgcagctcaggagatggctgctaaaacctggagcggccggtggtgggagaacggcggtggcggtaacgcctggcatggctggacttacgacgagaaatacaaccagctcatttttggtacaggcaatggtgggccgtggaatatcaaggttcgtagcccggggggcggcgataacttgttcctgtgctctctcgtagcggtagatgcggatacaggcgaatacaaatggcacgtccaaactgcgcccggtgacacatgggactacaactcgaacatggacatcgtgttggccgatctgaaaatcgatggcaaggatatcgatgctctattgcatgcgccaaaaaacggcttcttctatacgatcgaccgctcgaacggcaaggtactgtctgctgagaaattcgccgatgccaactggtcacccaggtacgacctgaaagagcaacgccatattgtcgctaaggacgccagatatcctgatggcgagaagaatatctacccttcggcattcggcgctcactcgtggcacgcgatgtcttataaccccgagttgaatcttgcctttatccccaccaaccatctgggcaataccttcaaggacgatggcaagaacacgaagcctggccacaagatggcgagccacaaactctatctgggcctgaccggttgggagctgaccaaagacccgcatgaatctcgcggttctttgcaggcctgggacccggtcaagaacaagcgtgtgtggcaagtgaaccagaagagcccatggggtggcggaaccctgaccacagccggcaacctggttttccagggccagcctgacggcctgttcaaagcctacgatgcgcgcaccggcgacgaactttggtcttatgacgtaggccttggcatctccgcgccaccgattacctacaaactggatggcaagcagatggtttcccttctggtgggacctggtggtgcattggcctccaactttggcggctccggtgaactgggttttgaaagccatggctggaaatatggtgtgcatgagcgccgcatcatgacgttttcgctagatggaaaagcggttgttccagaacaacctgcgccgcagcttgccaagccaattatcgatgcgaagttcgaggtcgatgacaaaaaagcagaggccggcgcaggtgttttcgcagagaacctctgcgttggctgtcatggcgccggagctgttgcgggtatgaaagcacccgatctgcgggagtcgccgataccgctcaaaggcaacgaaaaagcgttcgagagtgttgtgcgcggtggcgcgttgcttgccaatggcatgccgaaattcccggatttgacagatgcagagctggaaagcattcgtcatttcattcgtaggcaagcacacgatggtgtgaagtctggcggaggacactagccatcatttaaacgccaaaccaatcgcttgatccggtaacaccgacaagagcttgagtttggatagaagcctggatccaagtgatagaacgagcatgcaaccgccacttcaatcgcgaagattcgggctttgatctggacagaccgatatcgcagtgccccttacctagccacaggtaatgactaacgagcacaaccgcacgcggatatcgtttatgccataggccttccaactaacgatattcgctgcacccgcaccgtcacattcgaaggatcagaacaatgacaacaagcctgcgcttcggcagcggcgttctcgccgcctgcctgttcacttctgcccacgcggccgagtattcacccgatcagttcctcttcggcgactggaacggcagccgcacccgcctgcacgagtccggcatcgatctgcagatcacctacgtcaacgagctggcctggaatacccagggcggcgatgaccacactggcacctacgccgatcagctcatgttcgacgccgctctggatctggacaagttgctgggctggtccggcgccggtttccgcttcagcgtggtcaaccgcaatggcgaaaacctcaacgccgaggcggacctcggcgtgctgctgcagccgcaggaaatctacggctatggcagcaccacccggctggtgcagttctattaccagcaggcgctgctcgatgaccgcctgctgctcaagctcggtcgcctgcccatgagcggcgagatctatcccttcgactgtccgttccagaaccttggcttttgcggcacggtgcccggctacatcacgccgaactggtatacctggccgatcagccaatggggcgccaccgcgcgttaccagctgcacgaagagtggtcgctgcagaccgcgctttatcaggtcaacccgcgtttcaccgagcgtgagcagggcctgaacttcggcagcccgtcgggcaccaccggctaccacgcggtagccgaactgagctggacgccgaccttctccggccaacccggcgcctatcgcctgggcctctggcgcaacaccggcgatttcgaagacgtctaccgtgacgcggccggtcggccgatggcgctttccggcgcgccagccgccgaacacgacaaggctactggcggctacctgatggccgagcagcaaatctggcagagcgctgcgctgccggcgcggcggctgaagctgttcgccaacctgatccagtccgacccggacgtgacctatatcgagcgcatctggcaggttggcggcatcctctccgccccattcgcctcgcgcccgaatgacgagatcgggctgggtctcggccgtctggaaattaacgacgacgcccgcaagcatctgcgcgaacagggcgagccggtgccggatgtagaatacccagccgaactctactaccgcgtcgccttgaccccagccgtctcgctgacgccgaacctccagtacttccgtcggccaggcggtttcgacggtgcacaggacgtggtggccgtagggctgaagacggtgatcagcttctgacaatgctgctgccgttatccagacagagggtgtaacagaggggtaggttttgctggtacgccgggccgctgatcgtggacaacgcttgggcggctcccggtgccctgccaggaagtgaccgcaaagttctagttggcagggcctgaatatcggcgtcccaacggcctccccccgccctaggccagatcgctggacagcgctccctttgctttgggcccgcccacctgcgaacaaggccgcgagcgcctgctctgggaccctagctccccggcacgctgagccgcgcgtatgcagccctggggctgcagccggaagcggcgcaacagagccggccgacgccgttgctgttgctgttgcgcatacgagctgaaacgacaggaaaagccggggccggctgagcgattttcgagcagtctgaacgcagccccgatgctagcgacgttgagcgaaccttgtacggcgatatccacttggttatccacagtttctgtggattaagcctcgccgttctaaatccgacggagccaaaccgaacgccaacctgaacggagcgaagcgcgcccaggcagtatcgccgcagtagagcgcggcgcgctgtcccgatccggcaacgcatcgctgcggcgccgcaacaaagccggatctcggcctgcaggaattaatccttttggacaaccacaacggtgcggcaatcttcttccgtcctgcctgcaccatcgagcactaacacggcgggcaaccttcacggtctgcatccatccggatcagcagctacgctaacggtcgttcgcggcaaagctggacgacacgtcaggctgtcgggagcacctatccgcgccgaaccacacatggcccagcaaccctctacaacggctgcgaatcatgaagaaaaccgaacgagaagccctgcttcgcctattgaaggatcgcttcgagcaaaaggctcatcgccacgaaggtatcgaatggggcgatgtcctcgcgaggctggaaaccaaccccagtgctctgcgttccctgctggcaatggaaaacagcggaggcgaacccgacgtgatagcgcacgacaagcagacggggcagttcaccttctgcgattgctccagcgagagcccgtctggtcgccgaagcctctgctatgacgacccggcgctgaacgccagaaaggagaacaagccactggccagtgcgattgaacgagcccatgagatgggtatcgagctgttgaccgaacagcagtacagggcgctgcagaccctcggcgagttcgatagcaaaacgtccagctgggtcagcacgccgtccgatgtccgttcgctgggtggggcactgttctgcgatcggcgctacggcaaggtgttcctgtatcacaacggtgcgcagtcctactacgccgccagagggtttcgcgggttgctctacgtatgaacatcgacccgctcggccttggaaatagcccgtaaggatcaggaaagtccgggcaattcggaccggtcgagagcgtgcgacgccaggagtagcgcaggtttggagtgaaagcggatttattgtatacagtttcaataaaaacatgttcaatatgtatacaaaaccggctccttccccagcctgcggcctcgccagcaggttccaacaaccatgacgggagttttatggcaaacaccaaatactatgcccccactggcgggcacccagcgcagaccgaactgctgaccgatcgcgcgatgttcaccgaggcctacgcgatcattccgaaaggcgtgatgcgtgacatcgtcacgagccatctgccgttctgggacaacatgcgcatgtgggtgctttcccgtcctctgtccggctttgccgagaccttctcccagtacatcgtcgaactggccgaaggcggtggcagcgaccgccctgagcaggacccgaatgccgaaggcgtgctgttcgtggtcgatggcgaattcacgctgacactcgaaggcaccacgcatgcgatgcgccctggcagctatgcgtacattccgccggccgccacctggacgctgcgcaactccaacgccgctccggcacgcttccactgggtgcgcaagtactaccaggcggtcgatggcctggcgcgtcccgaagccttcgtcaccaacgagcaagacatcgagccgataccgatgccgggtacggacggcaagtgggtcacgacccgtttcgtcgacatgagcgacatgcgtcacgacatgcatgtgaatatcgtgaccttcgagcccggcgcggtcatcccgttcgccgaaacccacgtcatggagcacggcctgtatgtcctcgagggcaaggcggtctaccgtctgaaccaggactgggtcgaagtggaagctggcgactacatgtggctgcgcgcgttctgcccacaggcctgctactcgggcggcccgggcaagttccgctacctgctgtacaaggatgtgaaccgtcatatggatctgggcaagtacaaccaccgcggctgaccgttagcccagcgctgtccaaacgccctcctcgcccatggcctggagggcgttttcgttccccttgccctgccagtagcggcgcagcgttcaaaccgttagtcagccgggcctcaagctggccggcaagtagccgatagaccgccgttcgccaagcccgtcgttgggccggctgtttacaggttcaggacagatgtcagcattcagcaccatcaaggcccgttacaccctcaccttcatctgcttcgttctgctggtgatgctcctcaccatgcttgggataaagcgattcatcaccccgcagctcattgccgccggtgaaaccatcgtcttgtccgaggtcgccgagattggtgaacacatcggcgtagagcttgcgcgggtcgaagcccaggcacggagcattacccagaccgtacccatgctggaaagcgacgagatcgatcgggttctgcccggtctggtcgatcagtacggcgacgcgaaagtctttggcggcggaatctggccgctgcccaatttgcgtaccccggggcgtgccaaacacagcaccttctaccaccgggattcggcaggaaagctgatcgtcaacactcactggaactcggctgaatcgaagaattatttcgaggaaccctggcatcgcggcggcatgcaggcgcctcgtggcaagtgcgtctgggccgcggcgtacaaggacgacgccagcgccgagccgcgcaccaactgcgccatgaccatctacaaggacggctcggcctggggtgtctcgacgatcgatctgaccctcggcttcttcaaccgtctggtcgccgaaaagcagaacgagatcaacggcgaagtgatgatcgtcgaagcggatggcaagatcctcagcaaccagccacaactgagcgcagacatggtgctgcgtaacgtgtcggagctggccagccagtcgcctttcatcgccaccgtgcagaaggccctggccggtaagccgcagcaactgcatcgcgcgtcctacagcagggacggcgaagacttcagcttctttctgacccctatcgaaggaaccccctggtggctcgccgcggcgctgccgaccgcccagctcgaggcccgcagcgatgccatgctcaagacgctcgcctcgctgcagatacccatggtcatgatcctgctggcgctgatgatcgtcgcccttaaccagctgatgaaacggcttggggtgctgcgatcgaatatcgatgccctgtcggcgggtgacgccgatctgaccaagcgaatcgacatcaagggcgaagacgaggtcgatcaggttggtcgctcggtgaacggattcatcggctatctgcaagcgatgatgatcgatgtaagcgatgccactacccagatccatgccgaaatcggtcagctcaagcagctctcgcgcaccaccaacgaggccctggccaggcacgcatcggaaacggatcaggcggtcaccgcgatcaacgagatgagttcgaccgcagagtccgttgcgcagagtgccagcgataccgcgtccttcacgcaaaccgccaaccacaacgccgtctcctcgaagcgggtcgttgacgatgcctccaacagcgtgcgcgccctggtcagcgaagttgaaagcgcgaccgccaaggtgcaggcaatggaagccgatgcccaacggatcaacgacgtgctcggcgtcatcggtgatatcgccggccaaaccaacctgctggcgctgaacgccgccatcgaagccgctcgcgccggtgagcaaggacgcggctttgcggtggtcgccgacgaagtcagggcgctcgcggctcgtacgcagcagagcacctccgagatcaacgagacgctgcagcgcctgcagcaggccgtcggttcggcggtccaggccatggaacagaccaaggtcagctgccagaccacagcagacaagaccgcccaggtcaccgtcggcctggatgaaatggcgggctcggtcgttcacatcaatgacttgagcacccagatcgccaccgcagcggaagaacaaagcgccgtcgccgaggagatcaaccgcaacatggtcgctgtgcgacatgtcgtcgacgagctggttgaaagcggtgtaagcgtggaccgcagcaccgagtcgctgctcgacagcaacaggcgcctgtcggctgttgtcagccgcttcaaggtccgctgatatcggcagaaggcgctagaaaaaccacgccaggcggcgttgaaaacagcgagcgaacggcaacaggcgaaaacaggctcggatgcggaacgatctcgcatccgagcctgtttttaacgctctttttatagaagtgtcgattcggcacgctcccgctcgactaatcaggcatccaagcgaaattgcctgaaatcacgggagctgaaaatgttgaaactgtacggaacgccgccaacccgcgctctgcgcgtcatctggttgctcaacgaactggggctggaatacgagatggttccggtggatcttctgggaggcgagcatcgggaacacgactttctcaccctcaaccccgccgccaaggtgccggttctggtcgatggcgatctcgtcataaccgaatctgccgctattcagctctacctcgcggagaaaaaccccgaggcggactacattccgacgacggtggaaggccgcgcccagatgtatcgctggatcttctttctggtcaccgagatagagcagccgctctggcgcatagcgcggcatacgttcatctatccggaaaatcagcgactaccgcaggatatcgatctggcgcgccaggaaggcatcgagatggtggccgtgctggaacgacacatgaaagaccgtgagttcctggtgggcgaccggctcagcgtggccgacttcactgcggcgtatacgctggactgggcaaacgaagagcagatgctcgagaacgcgccgaggttaaaagcctacctggagcagctatacgcccgccccaaggctcctccaaccattgcccgggtgcttgcaacaaccgacaactagccgtggtcggccgtcgacatgagcggagcctgctctacaggccccgccgcaacgtacagccggcgctcagacggtgcgcaagcttggctgccagcgacggagcagcacgctggcattgacgccgccgaatccgaacccattggacagcgcatactcgatcggcatcttccttgcgttcaagccaaccagatcgagtccgtcggccgcctcgtcgggatcggtcaggttcaacgtgggcgggacgatctgatcacgaagcgcgagcacggtgaagatggcttcgatgccgccggcggcgcccagcagatgcccggtgctggatttggtcgaagtgatcgccacgcccgaccccgttccgaaggcggctcgaatggcggccaactcgcctcggtcgccgacctgagtggacgtcgcatgcgcgttgatgtgatcaacctggcccggcgccaccccggcctgttgcaacgccagttccatcgcccgacgcgctccgctgccatcggccggaccggccgtcaggtggtaggcgtctgcgctggtgccgtagccgaccagctcagccagaggctgggcgccgcgcgccagggcatgttccaaagattcgatcaccagcagaccggcaccttcggccatgacaaagccttcgcggttgcgatcgaagggccgagatgcttcctgcggacggtcattgaatccggtcgacaaagcccgcgccgccgcgaaactgccgagggtgacgcgatggatcgcggcctcggtcccgccgcagacggcgatatccgcctcgccgctgcggatcaggcgcgcggcgtccccaatcgcttgcacaccggcggcgcaggcggtgaccggcgcgccgagcggccccctgaagccgtgctggatcgagacatgcccggccgccatgttggccaggaaggacggcacggtgaatggcgacagccgacgtggcccgcggtggtcggtggtgcgcacggcctcggtgatcgcatcgaacccaccgacgcccgaggcaatcagggtggcggttcgctgccgggcggtttcgtcggtgggttgccagctcgcctgggtaagagcttccctggcggcgatgagcgcgaattcggtgaagcgatccatcttcttgcgatccttggccgggatataccgatcggggtcgtagccggcctcgctgtcctcggcaacgctcggcacgcgccccgctatggcgcaaccggtcccctccgccacgtcctcaggcaacgcgcgaatgcccgattgccccgccaacagccgcgaccagacgatctctgcgccacagcccagaggcccgacgatcccgacgcccgttacgacgatacgaactgcattttgcttggtcatgtcattccttacttcaaaggccggcggcgcacgacagcgtcgaacgctatccggcacagccgtggcgattggcctcgatcgtttgtgatgtcaatggacatcgatcactgccgacagcgacgcggggtggcctcacgcgctcggcgtgaggatcaggcaactggtcgagccgatggcgtagaggcggtcttccacatcgtaaaggcgcccttcggccacagcggtggagcgaccgacatgtatcacccggccctcggcacgtaccggtccgacgccggcgcgcagtgcacgtacgtaggtgatgcgcaaatccgtcgtcgtgtatccctgccctgtctccagccgggtgtgcaccgcgcagcccatgcaggagtccagcaaggtggccgcgtagccaccgtgcacagttcccagcgggttgtagtggcgctcgctcggcgtgccctggaagacgaaatagcctggtgcccagtccaccggcacgaagcccatcagctctccgattggcggacgaggcagctcgccccggccaatcgcatcgaagaattcttgcggagacatggccgtagccgtggcgagcggcacgctaccgaccggccccagccgggctcgcatggcttcttcggcattcagccattcggccaaacggctttctcgttctgcatggttcatgggccttcctcggcgattcgacgtttgcacgcgcattgaatgatgcacaacatataaaccatatgacgaccatcatgtaaagcgtgaacagactgccaggcgttgcgccacatgctgacggtgtcgctcaggcacccgccgcttgtgaccaatgaccgcacaggacgaggcggctaccttggccgtttggtcgcgactggggcattccggatcgagcacccagttccaacgttgcagggcgaggccagcggcgtgcgggcttggctggtcagcttgtgccggcatttttcaacgccgcctatggacttcaaatgaatggcttggcctgtcaggcgcacagccgggacctgcgttgcgcgattgattcgcatgggttggtgtgtatccactccccattcgtgcacgcgacgaccagcgtcgccttacatggccaggaatcaggcggtttcgccctttgcgcgccgcagcaagctggcgcgggtttcatcgagcagccgatcggccagttgcggatccgtcacgctacgcgaaagcatcaacgcgccaaccatcgcgctgagcgccattgccgcgtcctggctgtcgtccagatgcgcgcccagctgggccagccgtttgcataccaggtcgtcggtgactgcgctggcttggccgcgctgacccagttcggcggacacggtgggcaacgggcaaccctttgccggatcggcacgatgactcttggacagatacagcgcaatgaacgaggccaagggatggtcccctgacaggctgtcggccgtgacctcatcgagctcgctcaagcagtgacgcagcgcctcctcgaccagttcgtccttggatttgaaatgcgcataaaacccaccgtgcgtcaggtccagcgcgttcatcaatgcctgcagtccggtcgcgctgacgccatcgcggcgaaaacgccgtgcggcctcttcgacgatgcgttggcgagtcttggccttgtgatcttcggaataccgcatggacgcctccaccattcatatgctgcccgtcatgctacgcaattagcgaccgcatcaggggaaactttctgcatatcacggtaactggacgcggcgttgcacgttcgaggcgctggcagaaagacgtttcaggcatgtgcgggtgtggcgggtgacaaacgtcacaacatcatattgccattagccacggagcctgccataaagcagcactttcaaacgttacaaggacgtaccgatgcgattgctgcgacgtgctctgttcgggctgttgtcgatagccgtgcttgttgccggcgtagggctgtatttcgtggcctatccgaacctgccggattacgagcctccctcagagctggtctatctcgatcagtggagcgaggccgatcgccagacgttctacttcacgccacagggcactcaggtcaaagggctcgagtacgactggttcagggcgctggaactgccattcagccgcgacaagtttgcggccccggaatacctcgcacgctttggtttcctggtcgatccgaagcaacaacccacacccgcgaaccccgccaacctgcccgtaggctttgcccgccacgaagatgacgagaccgggcgcgcctacctggacgtgacgtgcgccgcctgccataccggcgagctgcgctacgaaggacgagccatccgcatcgatgggggcgccgcgatgcattcgctggcctccaccgtgccaacgttgcgcggcggcgccttcgggcaggcactcggcatgagcatggcgtttacctactacaacccgatcaaattccggcgcttcgcgaacgaggtggtgggtgacgacgaacgcaaccgtcatcagctgcgccgcgacttcaaacaggtgctcgatcggctgctcggcacggcactcaatgactggcaccgcgacctctaccccaccgaggagggtttcggtcgaaccgacgccttcgggcgtatcgccaacaccgcgttcggcgatgccatagacccgtccaactaccgcatcgccaacgcgccggtgagctatccgcagctgtgggacatctggaagttcgactgggtacagtggaacggctcggctatgcagccgatggcccgcaacatcggcgaggcgctgggcgtcggggcgcggctgcagctcctgcgcgagaacggccaaccaattccagaagctgagcgctatgcatcaggcgttcgcatccgcgaccttcacaccctggagaccaccctcacgcgcctcgccccgccgcgttggccggaggagatgctgggcaagatcgatctgcagcaggccagcctggggcgcgcgctctaccggcagaattgcgcatcgtgccacgaggccaggcccaagccggtcgaccagcgcttcgcgccagatcgcgacccggaatggcgcatgcgggtgatccccactgcgattgtcggaacggacccaaccgcggccgacaacattgccgatcaccgtttcgatctctcacggctcggctggacgcaagacgagctggagcggctggatgtccgtctctacggcaagccgaccggcacgctggatctcggtagcatctccagtgcaaagggcctggcgtacatcaccgcttatgtcgaacgtcgggcttaccaggatgcgggcataacgcctcaggaccgggccgagttcgacggctatgcactgccgatcggcgtgcaggagttacgcggatacaaggcacggccactcgacggaatctgggcaacaccacccttcttgcataacggctcggtaccgacgcttttccagctgttgtcgccgttggcggaacgccagaagcgcttctgggtgggcaatcgtgaatacgatccacggcaggtcggcatccgcaccgagcggttcgatggcggtttcctgctcgatacgacgatcaccggcaacgccaaccgcggacatgagttccgcgccggttgccggggcggcggtgtcatcggccgagcgctgtcacccgaagagcgttgggcactggtggaatacctgaaggtgctcggcgacccgcggttcgagcccagcttgacggacactgcgctccgcccccgcctcgccccgccaacctgcaactgacgctgcaaaggatatgcgtatgctcaccaaactctggctgttgttgggacgtctgctcggccgcctgctccttgtcgtagccacgctcggcctggcgagttgggcaatcagcgcgctggtgtatcacttcaagcaccgcggaccggtttcggccgaagagctgatcgccccgaccgaggccgccgatacccaggcaatcatcgacaatgcgatcgcggtcgtcgcgcagcacagcgagaacacacgcgtgctgcgcgatgcccacgccaaggcgcatggttgcgtcagggcgcaagtcagggtccgagacgacttggacgtcgcgcttcgacagggcgtattcgccgaggccggtcgaacctggcaagcctggatgcgcctttcgaatggcaatgcctatccccagttcgaccgcatcaaggatgcgcgaggcatggccatcaaactcctcgacgtacccggtgacaatctcacgctcgacccacgtcatgcccacgagcaggacttcgtgatgttcaaccatccggttttcttcgttcgtgacgtggccgagtaccgcaccaatttcgctgcccaagccgaaggcaagcggctactggccttcttcccgagcctcgatccgcgtagctgggaagtgcgccacctgttcattgccctgcagacgctcgccccggcccctgaaagcccggtagcaacgacctacagttcggtggcgccgtataaattcggcccgtacaacgtgaagtaccgagtggtacctgcgcccagccagtgtccggactaccagttgcccgagcagaaccgcgagctgcccaacttcctgcgtagcgcgctctatcggcagttgtcgctggaccgcgcgccggcctgctttcagcttcaggtccaaaggcagaacacggcgcactacatgcccatcgaagacaccagcatcgagtgggacgaagccatcgcgccattcgaagcggttgcggatatccgtgtgccagcccaggacttcgatagccccgaacagaacctcgcatgcgacaacctgtcgttcaacccgtggcacgccgtgccggaccatcgcccgatcggtggcataaatcgcctgcgccgggccgtctacgaggccatcagcgcctatcggcatgaacgcaacgaagcgcactgacgctcgccagcgtcgccaaaaacggttactgactaccggcctgcgaaggcgggtagccggtacgccaggtcagccgttcgcggcgatccgacagcttccggcttcgggatctcccaggtacgacacttcaggcaacgccagcccggcaaggggctcgccgtcatcgagcgcccgtttgaaaaggctctcttcagcaatgaggtacagtcgctccggcgcgtgaacgatcatttcccgcccgcgcacctcgagaatcccttcagaccgaaagcccgaaaagactcgcgagacggactcgatcgccaaacccaggtgattggccagctcccaccgagccatgggcaaccgtatgcgcgtcgcggagaggcttcggccagccagctgcgccatgtgatggacgatgaaccgggcaacgcgaatccgtgagcgaggggccgccaaccgcagccgcgcttgccggttatagcgcagctccttgctgaggagccgcaacagaaagcggttcagcgccggactgctggcactcacttgcttcaacgcatcgacggaaatatcgcagacgaccgtcgtctgcatggccgtcagggtgttgctgtaggtgtcgtcgcatagggctgccaccccggcgaaatcgcctgccagcgcgaagccgacgatgcgctcatcaccctcatcatccgttcgggaactccgaaccgagccggtccggatcatgtaaagcgagctggctgcctgaccggccctgaacaggacatcgcccttgttcaaaacgggaccctgcgttatcagccgacccagggtcatgaggtccatacgactcagtacggcaggcaagcactggttggcttttacgcagtgcaggcattgaggaaccgcctgggatttaatcaacgtttgtcattccaaacttcttccagtcagtgcgggtagcgatccgttcactcgctagcgcaacgactcgcgtttgcggcgtaatcgtcgctgttgatttcgtgggtactcaggaccgcctccaactgctggcgaatctcggggtggctgaccgatgcgagtaacgcttcgagctttcgaatcacccaacgttgtccgcggtcgatcaatgcgagacggtcgtcgaggttcgctatcgccatgcatttctcatagaacgcgcctcgctcctgtcccggctggacaccgagtagagtcaggcattcgcgcaaccgcttgcagctatcggcctcaccctggcgaaccttttccagcatgctgcgctgcaggtccgtttgcgcctcggcgaggctggccgtagcgacctggacccctgcccgctccgcgctgagcagctcgcccagcgcctcgatcagttcacgacgctctgttgtcacgcactcctcagccatcgcagtctcctcctctggtcgaaaacacctcgcgcgcgcgcatgcgcgccaccggagggcgcggcattgcgtgccggcatcctatggtgtcgttgcgcttaccgaaaatgaaatctgatgattattaagtgcagtttttttgcactgagccggggccgaggaggaagccgtgaatgtaacgactttgagtagcgcggaggagagacacaccgatagcctgacgaagcaccctgacaccaaaaagctcgcggtcaagaccgctcctaccaggcagcatcacgcaaccgtgagagcggtctcgaccgcgaaacctttcagcttctttaccgcgaggcgccctgcgcgccagctcggaagcgccctggggccacatcgaagaactcgcgaaagcagcgacggaaatgcgagctgctgacgaagccgctggcgacggcgatgtcggtgagcgatttgtttgtctgctgcagtagctggcgcgcccgggtcaggcgcagttccaggtagtaacgcgagggcgtggcattaacgtggcggaagaacaggcgttcgagctggcgccgggagattttcacgcaggcggcgatctcgttcacggtcagtggctcttcgatattgttgtgcatcagctctaacgccagcttgagatgctgtggcagggtcgggttgtagtccaccgcaaccaccgatacgtccattacctccttcatcttgtcgcagctgagcacctcgtcaaccgcattgaccaggctatcgccacagtcgcgcttgagcacctcgagcatcattcccaaagaactgttcgcgccagcgcagccgatccgctcgcgatccagtacataagcgcggttgcacagtcgcaccttgggaaacagctcggccatcattgcccgaccatccgggtggaaagcgcagtcgtaaccgttcaacaaacccgcttcggcgaggaaataagcgccgttccagaggccaccgagattggctccagccgcatcggccgaacgcagcttgctcctgagcagcggatcggcctgcaggcgtacgcgaaaaccgccacagaccacgatcagttgctgctccttctccttcagctctgcgagacggcagtcagccgagattgcgatgcccaggtcgctgacgaccacctcatcggcgccaccgacgaccaacacgtcatacaacggctccgcgctcatcaggttggccgtaatcagcgcatccacagcgcccgtaaaggccatcatcgagaagttctcgcgcagcacgaaagcgacccggcgcagcggcgtcatgcccccgccacgtgacaccctgtcgaggtgcgcgaggtttttgtttttcagcacactttcgaacgaagatctcatctgacgactctcaagcggcaagcttatatcgactgcctgaacgctacggctagcctctccctcgtagcgacggaagccacctggcagtccagcagcacggcgtcacagccgagcccggctgccacgaagcggccccgaccagctgcaaccttaaccgtgtccaacagaaggacctgtcttatcagcgacatccagttaacagctgggtccgtaattgatcgagcagacgcgacgccgagacttgtcagtccgccatctcggatagcccgcgaaacctcgaactatccgctcagggagtcatgccgcctttagacacggaccatcgatgcccgccgcttcaacagtgcttcgaaaccgtccagtacagcagccgataggatgcccacatgagccttgtcgccaatcgaaaggcagttcgtaatgctggcacgccgttacgtgatgggaccggcaaacatactgaagcgtgtctccggcctgcgaaggatcgacggcgacgggataggtagccgttcgccgcaaacattacggtacagcccggggcggaccggtacggcagcggctggatcagcaactaatcgccagacacaaaaaagcccctgttacggggctttcatgggaacgcactgggaacaaacacgcgctcttttgcgctgcctcagatacgcgaaagccccgaattacggggctttcagcgttttagatggtgcggacggagagactcgaactctcacaccttgcggcgccagaacctaaatctggtgtgtctaccaatttcaccacgtccgcaaaacttctaaacgaaaacgccaggcagcgcctggcgtttcggaatatggggtggacgatggggttcgaacccacgaccgcaggagccacaatcctgtgctctaccaactgagctacgcccaccatattgccttgcttgtgccagagcccgaaatggcgcacccggcaggactcgaacctgcgaccatccgcttagaaggcggatgctctatccagctgagctacgggcgcttttagctgcattccatctgagcgcagacttcaagctccagctaatgaggccccaaaaaccctcaaaagccgtcttacccagcagcaagctgtgctcgacaagcggggcgaatcttaatggtctgcctacacctcgtcaacagcaaaatcgaaaaaaaatcagtctggtaaaggggttacgggaaccgatctccgcttcgcctttgccggaagttatcgtcgtgcgagaatgcgcgtcctttttcagtccttctcgatggttatcacgcgtcatgaccgcacaactgatcgatggtaaacagatcgctgcttctatccgccagcagattgccggccgagtagccgagcggcgtcagcaaggtctccgggtaccggggctggcagtgatcctggtggggaccgatccagcctcccaggtgtatgtcgctcacaagcgcaaggactgcgaagaagtaggcttcaagtccacggcccatgatctgccggccacgaccagccaggaagacctgctggccctcatcgatcaactcaacgaagacccactcatcgacggcatcctcgtgcagctaccgctgcccaagcacctggatgcgtcccagttgctcgagcgcatccgcccggacaaagacgtggatggtttccatccgtacaacatcggccgcctcgcgcagcgcatgccgctgctgcgcccctgcacgccgaagggcatcatggccctcctggaaagcaccggggtcgatctgcacggcctcaatgccgtggtggtcggggcgtccaatatcgtaggccgccccatggcactggagttgctgctggccggctgcacgaccaccgtgacccaccgcttcacccatgatctggctgaccatgtgaagcgcgccgacctgatcgtggtcgctacgggcatcaccggtctcgtcaaaggcgattggatcaaggaaggcgcgatcgtgatcgacgtgggcatcaaccgtcaggccgatggcaagctggccggagacgtggagttcgatatcgccgtgcggcgcgccggctggattacccctgttccgggtggtgttggcccgatgacacgcgcctgcctgctggagaacacgctgcacgctgccgaacatctgcacgactaagccaagcgtccgcctgcaaagcacctggcaagtaaaacggcacccttggggtgccgttttgtttccagcggatgaccgttctgcgctggcctagcgggcctgctcccacgacttgatcagctcgtcgtaactgacggtctggccctgcggtttttcgttctccagcttgggtttcggtgagcccggctgatccagccagtactgcggatcacgcggctcgttcatcttgggtccgcacttgggttgcaccttggcccgctccaaccgcgccatcatggtgtcctgggcttcggcaaggccatcgagggcctcctggggcgtcttgtcaccgctcgccgcttcggcgatgtactgccaccagagctgcgccaggcgtggatagtccggcacgttggtgccggtgggcgtccactgtactcgggccgggctgcgatagaactcgaccaggccaccgagcttcggcgccgcatcggtcatggcctgcgagttgatgtcggactcgcgaatcggggtcagaccgaccagggtcttcttcagcgacacggttttcgacacggtgaactgcgcgtacagccaggcggccagccggcgcttttccggcgtcgagttgaggaaggtccaggaaccggtgtcctggtagccgagcttcatgccctcctcccagtacggccccttgggcgacggtgccatccgccacttcggtgtgccgtcctcgttgaccactggcaagcccggcttggtcatgtcggccgtgaaggcggtgtaccagaagatctgctgggcgatattcccctgcgctggaaccggaccggcctcggagaaggtcatgccctgggcttctggcggtgcgtactggcgcatccagtcgacgtacttctgcgttgcgtagaccgccgccggcccgttcgtagcgccgccacgcgccacgctcgagcccaccggatggcagtcctcgacccggataccccactcatcgaccggcaagccgttcggcaaccccttgtcgcctgcaccagccatggagaaccaggcgtctgtgaagcgccagcccagggacgggtctttcttgccatagtccatgtgaccgtagacgcgctggccgtcgatctccttcacgtacttggtaaagaactcggcgatgtcttcgtacgccgaccagttcaccggcaccccgagctcgtagccgtaacgctccttgaactgctttttcagctcggggcgctcgaaccagtcagcacggaaccagtaaaggttggcgaactgctggtcgggaagttggtagagcttgccgtccggaccggtggtaaaggaaataccgatgaagtcgtcgaggtcgagcgtcggcgaggtgacgtccttgccctcgttcttgatcatgtcgctgatggccacggctttgccataacggaagtgcgtgccgatcaggtcggagtcgttgatgtagccgtcgtagatgttcttgcccgactgcatctgggtctgcagcttctcgacgacgtcgccctcctgcatcagatcgtggcgcagtttgataccggtgatctcactgaaggcacgcgccagggtcttggattcgtattcgtgcgtggtgatggtttccgaggcgacgttgatttccatgccgcggaagggctcggccgccttgatgaaccagcgcaactcctccatctgttgttcgggcgtaagcgtggacgggttgaactccgactcgacccatttcttcgctgcgtcctcgtaggcgtccgcccacgccgttcctgccatgccagacaacgtcagcagggccgtaagcgccatgccatgtcgggtgttgtttttattgttgaacatacacacctccttcggatttttcggagagaagaaccgcaccggctcaaccccagcgcatcactgcaaacaaccagacgacagatagcaccgtcgctatccagatgccccagtcggtcagccctatcagcaaaagatgccaataggcgctgcccagaagtccaatgaacaatcggtcgccgcgcgtggtgacgatgggcagaaagcccttgcgtggcacgcaggggcgccgcagttcccaggcgctcatcagcgccagcatcgcgccgatgccggagaagaacaccgcggtaaaggtggtccaggccatccagctcatgtgctgctcctatacccggccgagggcaaagcccttcgcgacgtgattgcggacgaaccagatcaccagcatgcccggcaggatggtcaggacgccggcggcggccagcacgccccaatcgatgcctgacgccgataccgtccgcgtcatcaccgaaacgatgggtttggcatccactgacgtcagggtgcgcgccagcagcaactcgacccacgaaaacatgaagcagaagaaagccgtgaccccaatgcccgagcggatcaatggaatgaagatcttcacgaagaatttcggaaagctgtaaccatcgatataggcggtttcgtcgatctctttcgggacccccgacatgaagccttcgagaatccacaccgccagtggcacgttgaacaggcagtgcgccagcgccacggcgatgtgcgtatcgaacagcccgatcgaggaatagagctggaagaagggcaacagaaacaccgccggaggcgccatgcggttggtcagcaaccagaagaacagatgcttgtcgccgagaaagcgaaagcgggaaaaggcataggccgccggcaaggccacggtcagcgaaatgatcgtgttcaggcagacgtaatacagcgaattgatgtagccgctgtaccagctgcggtcggtgaagatcagccggtagttatccagcgtcaggtcccgtggccaaagggtcagcccgccgaggatctcggtattgctcttgaacgacatgttgacgagccagtagatcggcaccatcaggaaggcgatgtagaggattagaacgagacgtttgcgcaggttcatcgacgagccctcttcatttctggtcgccgtgagtcatggcggtgtagaacagccaggacaccagcagaatgatcaggaaatagatcagcgagaacgctgccgccggaccgagatcgaactgcccgacggccattttcgtcagcgtctggctgagaaacgtggtggcattgccggggccgccaccggtcagtacgaacggctcggtgtagatcatgaagctgtccatgaagcgcagcatcacggcgatcagcagcacactcttgagctttggcagctggatgtagcggaacaccgcccaggtcgaagcccggtcgattcgagccgcctggtagtaagcgtccgggatggcccgtagccccgaatagcagagcagcgcgaccagcgaggtccaatgccagacgtccatcaccagcaccgtcacccaggcgtcacgggtattggaggcatagttgtagtcgatgcccagctcacggaggctgtaccccagcagaccgatgtcggcgcgaccgaaaatctgccagatcgtcccgaccacgttccacgggatcaacagggggatcgccatcacgatcaggcacagcgatgcccagcgcccgcgggtcggcatggtcagcgccacggcgatgcccagcggaatctcgatcagcagcacgcagccggagaagatgaattgccgcaacaaggagtcgtgcaggcgtggatcgtggaggatctggcgataccagtccgcaccgacgaagaaccgggtcgaggagtcgaagatgtcctgaaccgaatagttcaccacggtcatcatcggcagaatggcgctgaaggcgaccagcagaaacaccggcaacaccagccaccaggcacggttgtcctgaaccttggtcatgcgtcgccctccaccagccggtcgtctgcatagagcatcaaccactgcgccggaaagcccacccacgcctgcccccttggcaccgcctggtcttccggcaggcgggccttgatcacattcccctccaggcgcagcgtcagtatcttgtaggtgcccaggtcttccattcgcaccacctccgcgggcatgccaccggcagccgattcggcactgatctgaacgaactcgggacggataccgatctgcaggcggctgccttccagcgcgggcagccgggcggccagcgtgtccgcaagcggcagatggagatcgccaaatccgaccccgcccgcctcggcacgtacgtcgatcaggttcatgccgggactgccgacgaaaaagccgacgaaggtgtgctgcggccgctcgaatagctcgcgcggtgtgccgaactggacgatctgcccgccatgcatcacggcgatcttgtcggcgaaggtcgaggcttccagctggtcgtgggtcacgtagatcatcgtgatgttgaactgctcatgaatctgcttgagcttgcgtcgcagcttccatttcaggtgcgggtcgatcaccgtcagcggctcatcgaaaaggatcgccgatacgtcgtcccggaccaggccgcggcccatcgataccttctgcttttcatcggcggtcaggttgcgcgccttgcgcgaaagcagcgggtgcagatcgagcacctcggcgatctcgtgcaccttgctggtgacccgcgcctcggcaacgccctgattgcgcagcggaaaggccaggttgtcgaatacggtcatggtgtcgtagacgaccggaaactggaaaacctgggcgatgttgcgctgttcgggtgtcatccggttcacctcgcgcgcatcgaacagtaccttcccttctgacgggctgagcagcccggaaataatattgagcagggtcgacttgccgcagccggaagggcccaacagcgcataagcgccgccctgctcccagacatgatccatttcccggatggcatagtccgcggcgccgcgcggctgcgcgctgtagctgtgggcaaggttctgcaaacggatttccgccatgacactctcctcaggcacgccgggccggtgcctgggccaactggccggaggcgtcgaaaacgaacaatttgtgcgtcgggatgtacacccggatcggtgagtccaccgggtagtcgtgtacgccttgaaggtgcaacaccaggctgaaatgctcgttgcgcacgtggaggaacgtctccgaaccgctgatctcggcgatctcgaccaaaccggacacttccagatcatcatcgttggagggcaccagcccgatatggctgggccgcacgccgaatcggtattcaccctcgtgcagcgcgcgcaggtcagcgttgagcggaaagtgcatgcagtccttaaagctgacctcgttgacggcaatccggcccggcagcagattgatcggcggctcggaaaacagctcggcacttagcatctggcttgggcggtgatagacctcggacgtcggcccgctctgtattacgcggccttcatgcagcactgtcgccgttccgccgagcgccagcgcctcgttgggctcggtggtggcgtagacggcgatgctgcggcgagtcctgaacagctcgcgcatctcctgccggagctcttcacgcagcttgtagtccaggttgaccagcggctcgtcgaacaacaccaggtccgcgtccttgaccagcgcccgcgccatcgccgttcgttgctgttggccaccggataactccagcgggtaacgcttgagaaacccttcgatgtgcagcatctcggcagtctcgccgaccttgcgctcgatctcggccttgctcataccggcctgacgcaacggcgaggcaatgttctcgaacacggtcagcgtggggtagttgatgaactgctggtagaccatcgaaacgttgcgcttgcgcaccgggacgcccgtcacgtcggcaccgttcatcagcacgcgccctgcgctgggcttgtcgagccccgccatgagccgcatcagcgacgtcttgcccgacagggtgcgcccgatcagcacgttgaacgagcccggctcgaacaccaggctggcattgtcgatatgccgttggccatcgaccgtcttggtgacctgttccaggatcagggacatgccgccttcctctatttgttatggaggtaagcagagcgatatccgtgccagccatccgcgagggctctggcgtgcggtttgaatagcaaactgatgttgccaagtgttcaaaatgaacaattctgaacattgacagtgaacaaaaatgaacaagactgttcatggcgccgtacgcggcagcacctccataacaacaagaagatgcagcaacagagaggcaacatggccgacccagctccgtccacctcacatcaggccctggtagaggattcctggagccgatgcgaacgctacgggctaaatccgcactgcgttccgagtttcggcgaacccaccgagcaggagatcaacgccctgctcgatcgtcagcgcagcctggtgcagaccacccagcgcgaagtgctgccgtattacgagaatatcctttcgaattcgagctgcttgatcctgctggccgacaacaccggtcagctgctcgagtcgtggggcgataggcgtttcgtcgagcccgcgcataaacgagggtttcttcccggcgccagctggatggagcgcgacaccggcaccaacgcgatcggcaccgcgctggccagtgggcaggcggtgcacatacagcgtgacgagcactttctgatggccaatcgttacctgtctggcgccgcttcgccgatcttcgacgcacaacgccagctgatagccgtactcgacgtatccagcgacagttaccttccgccttcgcacacgctcggcatggtcaagatgatgagccagtcggtggaaaaccggctcatcctcaacctattccatgacgactatttccagctcaccttcaataccggccaggacaacctcgacagtcaatgggccggcctgttggtgttcgatgagtcgggcctgatcgtatcggccaaccggcgtgccgacagcctgctgggtatgtccatgacgcgctcacgcatcgacagcctgttcgacgtgccgttgctgcaattgctcaaccagccggaagaccagcccatgcgcctgctggccctgggccgccatcgtttccacggcagcatccggcgcccgcagaagccacgcatccaaccgcgggattttcgcccccctacagagcagcccgtcggcctggccggtatcgagcaaggcgatccgaaggtgcgcaaagtgttccgccaggcccaactcatgcttgagaaagacattccgattctggtccacggcgagaccggcgtcggcaaggaggtgctggtcaaggcactgcacgcggccagctcgcgcggcaaggcgccgttgatcgcagtgaactgcgcggcgatccccagcgaactgatcgaatccgaactgttcggttacgagaaaggcgctttcactggtgcccaccagaaaggcagcctggggctgatccgcaaggcggacggcggcgtgctgtttctcgacgagataggcgatatgccgcttaatctccaggcgcgcctgttgcgtgtgctgcaggaccgtagcgtccagccgctcggtggcggtgagccgtttccagtcgatttccgcctgatctgcgcaacgaaccgatcgctccgccaggaagtcgagaagggtcgtttccgccaggatctgttctaccgcgtcagcgggctcaacatcgagctgccgccgctacgggcccgccacgacaaacaagcactgttccagcgaatctgggagcaatatagagaaccccagcaacgggccggattgagtgctgaagtgcagcgcctgttcgagcaccacccttggccgggaaacattcgccagctgagcagtgtcattcaggtcgcgttggccctggccggtgatcagccgatccaccccgagcacttgccggacgacttcttcgaagatctggaacgcgctccgactccatcgccgcgcctggtgcaaaccgccccctccccgagcgacgatctggccagccattaccacgcctgccgcggaaacatttcgcacctggcccgcaacctgggaatgagccgcaacaccctgtacaagcggctacgcgagcaagggctgaagatatagggatctgaacgccgcccgcccgcaaatgagcaccgcttgttcaatcgagaaaagagtgatttcatcggcgctaattaattaactgattaattaaatatgtctgacgctcatagaactcgccgcaccgctggccgccctgctgcgcacaaacaggtgcagcgtgaccagctactcgaccttgctacccaggcgttcgcccacaccggtatccaggccagcagcctgcgcatgatcgccgagtcggccggggtgactcccgcgttgctcaactactatttcggcaacaagcagcagctcgtcgacgccatggtcgaggaacgctttctaccgctggtccgggaaatcgccgaaccgctgcgatcagcgggcgacgacccgcaacgcctggtttgcaccttcgtccgtagcatgagcgaaatggtgcgtcgcaacccatgggtaccgccgttgtgggtgcgcgagatcctctgcgagggcggcctgttgcgcgcacaactgaccacccggattgcccctatggtgccgttgctgctggctcagcgcttcgcctccgcccaggcacgtggagcccttaaccctgccctggacccgcgcctgctggtggtatcgctaattggcgtgaccatgctcccctacgccgccgagccgatctggcgcggcatatttgccaacccggagatcggccacgaagcccttatcgaccataccctggccctgctggaacgcggcatggaggtctgacatgaaccgcttactgcttgtcggcctgttactcctcgggcttatcggctgtgaagccaaaaacgacaaactcctcggcactctggagtgggattcgatcagcctgcccgccgaagcctctgagatcatccttagcgtgaacgtgaccgaaggcgatcgtgtggaagccggccagttactgctggagctggatcctcgccgccaggatgcccgcctcgctcaggccaggggtcaggttgcccaggccgccgcccagctcgctgagctgagcaatggcgcccgtcgcgaaaccatcgaagcggcccgcgccgggttagccaggagccgcgcggaacagaccgataccgagcgtagcttccagcgcatcgctgcgctctatcagcgcaaacaggtggccatcgccgagctggatcggtcgcgtgccgcccgcgaccaagcaagggcctccgcgcgcagcgccgaggcgcagctgagcgagttgaccaacggcacgcgcccggaacgcctggagcaagccgccgccgccctggacgccgcacgcgcgaatctgacccagctgcagattggccgtgagcacctcagcctgcgagcgcctcgtgccggcctggtggatgcattgcccttcaagacgggcgaccaaccgccggccgaggccgaactggtccgtctgctggtgggcgatgcgccctatgcgcgggtgttcatcccagcgagtcagcgcgccttgatccgcatcggcgaccgtatgcaggtctgggttgaaggcatcgacctgcctttcgccgcgcgtgtccgcaacattcgcagcgaagcgagcttcacgccctactacgcactcacgggcgatgacgccagtcgtttgtcttaccgcgccgaactggcgcttgaaggcgtcgagacgcaacggctaccggccggcctgccgctgcgggcagaacgggtgaacgatgaacaatgacgacttggtgatacgcgcacgcggcctgagcaagcgcttcggcacgctgaccgccgttgaccatctcgacctcaacgtgcgccgtaccgaagtatttggcttcctcggacccaacggttgcggcaaatccaccaccattcgcatgctctgcggcctgctgcggcccagcgagggagaagtcgaagtactcggctaccagattcctcgagacgccgaagcattgaagcgccgcatcggctatatgacgcagaaattctccctttatgacgacctcaccgtcatagaaaacctggagttcctcgccgccgtccacggcctgaaccgtcgggacacccgccagcgtaccgaggagttgctggaacgctattggttgaccgaccagcgctcgcaaatggccggcaccatgagtggtgggcagaagcaacgcctggcactggccggggccgtattgcacaaacccgacctgctgctgctcgacgaacccaccagcgccgtggatccacaatcgcgccgagaattctggggatcactgttcgaactggccgatgccggcaccaccctgctggtttccacgcactacatggatgaagcagagcgctgcacacgtctgggtattctcgacgctggccggctggtcgccgacggtagcccacgagagctgatggacgctctacccagccacccgctgttgatcgaatgcagccaaccacggcaagcccaacgggcgcttgaagggcacccgaaagtgctcgctatggcgcagatcggcgcagtgctccgcgtgctatgcgccgacagcgaagtgcgcgaggacatctccgccacactacagcgcgctggcataaccgccgaactgcgggacggtgaagccaatctcgaggatgtcttcgtcagcgtcacccgcaagcccgtggaggccgcgccatgaacctgcgcaggctgggcgccatcgtgctcaaggagctgcgtcagctgcgccgcgaccgactgacctttgccatgatcgccggtatcccgctcttgcagctggtgctgttcggttacgccatcaatatggacgtgcgcggcatccaggcagcggtgctcgaccaggccaatacgtacagctcccgcgaagccatcgccgaattggcctccagtcaggtgatcgacctgcgctaccacctggacagcccgcagcagatcaaccaattactgcgcgagggacggatcagcgctgccctggtggtccccgcggatttcgatgcacgcctgcagcgcaaggaccgtcccccgctgcagctggtggtcgacggctccgaccagagcgtgcaagcctcggcccgccaactggcgtcctatcctctgccgggctggagcaatcgacgagccgtggaggtcgtcaacttctataacccggaacgcctggcgccgctgaacaccgtgccggggcttttgggcgtgatcctgaccatgaccatggtgctgttcaccgcggtcgccctggtacgcgaacgcgagcgcggcaatctggaattgctgattgccacaccagtctcgccctgggaactcaccatcggcaaggtcctgcccttcgtgggcatcggcctgatacaggtcagcgtcatcctgctggttggccactggttgttcgccgttccggtacgcggctcactgttggagctatacggcgcctcgctactgttcatcgtcgccagcctgtcgcttggcgtgttcctttccaccatggccagtactcagttccaggccatgcagatggcgttcttcacgttcctgccgcagatcctgctgtcgggattcatgtttcccttcgccggcatgccgaaagctgcccagtggatcgccgagttcttgccactgactcactatctgcgcatcacccgcggcatcatgctgcgcgcggcaggcatgggcgaattatggaacgaagccctgtggctgctggtgttctgcgccatcctgctggccctttcggtgtcccgcattcagaagcgtctggattgaacgctgcgcagcaacaagcccgccagaaggcgtctttcctccaaaacgaaaaaggccgcacgcagcggcctttgtcttcgacggcaatcagtcagccagccgccaggtggttccgcccttgccgtcttccaggacaacgcccaacgcggtgagttgatcgcggatacggtcggactcggcccagttcttctcgacccgagcctgcagacgagccgcgatcagcgcttccacctgagccgcatctaccttgccttcggcaccggcctgcaggaagtcgtccggttcaagttgcagcacgcccagcggttcggccagcgccttgagacgcgcagccaggccagccgcagcttgcggatcggaggcgcgcagccggttgacctcgcgggccaattcaaagagcacagcgcaggcttccggggtattgaagtcgtcgtccatcgccgccgagaaacgctcgatgaaggcctcaccgcccgccggcgtcgcgtcgggcataccgcgcaaggactggtagaagcgctcgagcgcgcctttggcttctttcaggctgtcttcggaatagttgatcggactgcggtagtggctcgacaccaacaggtagcgcaccacttccggctggtatttctccagcacctcgcgaatggtgaagaagttgcccagcgacttggacattttctcgccatcgacacggaccgctccggcgtgcatccaggcattggcgtattgcttgccggtcgccgcttcactctgcgcgatctcgttttcatggtgcgggaacaccagatcggggccgccgccgtggatatcgaaggtctcgcccaggcagcaggtggacatgaccgagcactcgatgtgccaacccggacgccccgctccccacggcgactcccagctcggctcgcccggcttggcggctttccagagcacgaaatctagcggatcttccttggcctcgtcgacttcgatgcgagcgccgattttcagatcctcaatcttgcgtcgcgacagcttgccgtagccgacgaacttgccgacccggtaatagacatcgccgttacccggcgcgtaggcgaagcccttgtcgatcaaggtctggatcatgctgtgcatgccggcgatatggtcggtcgcccgcggttcgagatccgggcgcagcacattcagccgcgcttcgtcttcatgcatcgcagcgatcatgcgcccagtcaacgcctcgaagctctcgccgttttcctgggcacggcgaatgatcttgtcgtcgatatcggtgatgttgcgcacgtaggtcagctcgtaaccacgttggcgcaaccagcgcgaaaccacgtcgaacgccaccatgacccgcgcgtgaccgatatggcagaagtcatagacggtcatgccgcacacgtacatgcgcacctggttgtcgatcagcggcttgaggggctccttggccttggtcagggtgttgtagatcgacagcgccatcactggcctccccaggaatcacgcagggtgacggtgcggttgaataccaacgcgtccgcgcgactgtccttgcgatccacgcagaagtagccctcgcgctcgaactggaagcgatcttccgcttcggccgaggccagcgacggctcggcgcggcagcccttgagcaccaccagcgactcgggattgatgttgtcgaggaagctgccgccgtcttcatctttctcgggattggccgagcggaacagacgatcgtacagacgcacttcgcattcgacgctctcggccgctggtacccagtgaatgacgcccttgaccttgcggccttccgggttcttgcccagcgtgttctcgtcataggagcaacgcagctcgacgatattgccctgcgcgtccttcaccgcttcgtcggcgcggatcacgtagctgccgcgcaggcgcacttcaccacctgggatcaggcgcttgaaaccggctggagggacttcttcgaaatcgctggcgtcgatgtagagctcgcgcgagaacggcaattggcgcacacccatgtcctgcttggggtggcaaggcagctcgaggttctcgacctggccttcgggataattggtgatgacgactttcagcggcttgagcacgcacatggcccgcggcgcgttggcgtccaggtcttcgcgaatcgcgaattcgagcatgccgatatcgaccacgccacccgcgcggttcacgccgatcatgtcgcagaaggtacggatcgacgccggggtataaccgcgtcggcgatagccgctgagggtcgacatgcgaggatcgtcccagccgcttacgtgcttctcgtcgaccagttgcttgagcttgcgcttgctggtgatggtgtagttcaggttgaggcgggcgaactcgtactggcgcgggcgcgccggaaccggcaggttttccaggaaccagtcgtagagcggacggtgatcctcgaattccagcgtgcagatcgaatgcgtgatgccttcgatcgcatccgactgaccgtgagtgaagtcataactcgggtagatgcaccagtcattgccggtctggtgatgatgcgcatggcggatccggtaaaggatcgggtcacgcatgttcatgttgggcgaggccatgtcgatcttcgcgcgcagtgccttggccccatccgggaactcaccggccttcatccgcgcgaacagatccaggttctcctccaccgagcgatcgcggaacgggctgttcttgcccggctcggtcaggctgccacggtattcccgcgcctggtcaggcgtcaggtcgcagacgtaggccttgcccgccttgatcagctcgatggcccacgcgtgcagctgggcgaaatagttggacgcgtaacgctcctcgcccgcccactggaagccgagccactgcacgtcgctcttgatcgcgtcgatgtactcctgatcctccttggccggattggtgtcatcgaaacgcaggttgcactcgccgccgaactccttggccaggccgaaattcaggcagatcgacttggcgtggccaatgtgcaggtagccgttgggctcgggcggaaagcgcgtgacgatcttggcatgcttgcccgactccaggtcggcctggacgatgggacggagaaaattagtggctgcggtagtctcaggcttgctcatgatgtccttaacgatctgcgagtgtgcggctcagcggtttgaaagtaacgggcgatggccaggcagggcgagatcagccgaaagcggaatgtacgagatatacaagggcattcggggctgatttcattgcggcatggcgagcgtactcgtttgtaaacaccctttcagggtaggccgaccaaatcaaagcgcctatcatagcggacccgtcaaccccctgacagagcaaagcgcgcagccgcgcgacagcgacatcacgttcgccaggcgccggtcgtaccgtcgcggcacgatttctcccgctgctaattaaggaaggctccaatgatcaagctacacaccaaccatggcgtcatcaccgtcaagctgttcgaggacaaggctcccgaaaccaccgcgaacttcaaggaatacgtgaagagcggccactatgacggcaccgttttccaccgcgtgatcagcaacttcatgattcagggcggcggcttcgagccgggcatgaagcagaagaccacccgcgccccaatcaagaacgaggccaacaacggcctttcgaacaagaccggcaccctcgcgatggcacgcaccatggagccgcattcggcgtccgcgcagttcttcatcaacgtcaaggacaacgatttcctcgaccacaccgcgccaaccgtgcagggctggggctatgccgtgttcggcgaagtagtcgaaggcatggacgtggtcgagaagatcaagggcgtgccgaccaccatgaagtcgggacaccaggacgtgccggtagatgacgtggtgatcgagaaggccgagatcgtcgagtaagcgctgttgatcctgctgatatcggacttgcacctcgaagaacgacgcccggaccttacccgggcgtttcttcatttcctcgagacccgcgccgccaaggccgaagcgctttacatcctcggtgacttcttcgaagtctgggttggcgatgacggcatgacgcccttccagcacgaaatcgcccacgccctgaaagcgctgagcctgagcggaacgcggctttacctgatgcacggcaaccgtgatttcatgatcggcaaggcgttctgtcgcgaggcggggtgcaccctgctggatgatccatatgccgcccagctcggcggtgagcgggtgttgctcacccatggcgacagcctgtgtacccgtgacgagggctacatgcgtctacgccgctggctgcgtaacccagtcagcctgttcatcctgcatcaccttccgcttgccaaacgccagcagctagctcagaagttgcgatcgagcagcaagcagcaaacccgcatgaaagccagcgacatcgtcgacgtaacgcccgacgaagtggtccggatcatgcgacgccacaacgtacgcacgctgattcacggccacacccaccgccccgccatacacacgctggacgtggacgggcagccggccaggcgcatcgtcctcggcgactgggatcgccagggctgggctttgcaggtcgatgaatcaggcttcgaccaggcgcccttcgagctgagctgagcaggtcaggcggcgctgggcacaccgctgtggaagcgaaactcatggtcagggctttcgatcagctcgcgctcgcgctcgcgtaccctcacgatggtcgcgtcgatatcggccgcctcaccatagagatacgccagcttcagataatcctgaaaatgccgcgcctcggatttcagcaagccgtgatagaacttgcccagctcttcatccagatgcggcaccagcatcgcgaagcgctcgcaggatcgcgcctcgataaaggccccgatgaccagggtatcggtgagccgatagggttcatggttgcggaccagctcccgcaacccggcagcgtagcgggatgagccgatgttacgcagcgcgatgtcgcgcttacggataatcgacagcacttgttcgaaatggcggagctcttcccgggccagccgcgacatcttgttctgcaggtcgggtttgtcgacatagcggaacatcagctgaaaggccgcaccggccgccttcttttcgcagttgccatgatcgatgagcatcacgtcctgattgcgcagcgcgacgtcgacccagctggacggtgtggcgcagccgagaaattcattcaattcggggagcatgagtacgggtattcataagggaaatggacacgacagccagcgcaatggcgaccgcacgccgcgcattatacgagtccggcagcgtacggccagcggaggttgatatggatcactggccgcggcgacggccttgtctatagtgaactcaaccgatactggaaccggagccggtcatgcaagccttacgctgtattctcgtggtaatcgacccgaacctgccggaaaacctggcactgaaacgtgcacgattgatatccagcgtcagccagtcccggctccatctgctggtctgtgacacgcggcaggatcacagccactacctggatcgcttacgctcggaactcgaagagcaaggccacgtcgtcacgacccgccaggactggcacgagaacctgcatcagaccatcattgctgcccaacaagccgaaggctgcgacctggtgatcaagcagcatgtcgccgacaacccgctcaagcgagccctgctgacaccggatgactggaagctgttgcgctactgcccgtgcccggtgttgatggtcaagaccgaggcgccgtggacgggcggcaagatcctggccgcggtcgacgtagggaatgccgacatcgagcaccgtacgcttcactcgagcatcatcaaccatggccatgagattgcgtcgctcgctgaaggcaccctgcatgtcatcagcgcccacccttcggcgatgctctcggcggcagaccctgcgtttcaactcaaggacaccatcgagcaacgctatcggaacgcctgcaagcagtttcaggtcgagtacgacatccccgacgggcagctacatatcgaagaaggtccggctgatgccctgataccacgggtctgccatcaactgcaggctgtcgtaacggtgatcggtacggtagcccgcaccggtttttccggcgcactgatgggcaacacagccgaggtcgttctggacgcgctggaaagcgatgtcctggtgctcaagcctgacgacgtcatcgaccacctggaggatctcgtcgcgcgccgctagacaggatcaggagcggacgatccgcctcaccgggagaggcggatcctaccccgccgtgtcgtctaggaactgcggagcgatatagcggtgataatgcgcctcggacaggatgaagaattcccgatcgatcgcatcacgaagctcgggtaaagaccattcgcgaaattccggcaacagggcgacaccgtacgcctcgagttgctggatcactcgcgcgcctcgcgcgatcagctgataggcccagcagtatggcgattgctcggcaacgaagcggatctgccggctttccagctgtcggcgaagcaatggcgcatcgaatacttccagcttcgccgccatcacctgcgcgagcagcacttccaggcgatgccagaccgagcgcttgccctcctcgctgtaaccgttccagttcaccacttcgtgatgaaaccgtttgcagccgcggcaaaccacatcgccgtagacggtcgaacaaaggcctacgcagggagttttgattcgctgatttgacatgacgggcgatgaatcgaagaacagcgcagcatcttagacttttgtccaagccgggtcacggatcaatccggatcgaaccgcccgaagggccgcaaacgcccatactcagcgggatcctgccgcccgagcgcgcaggggtttgtagaggtcgctttcggactgccgtggcgcttcacttaactttacgggtccgttccagtagaatcggcccgccgttttaggcgccacaatccgcaagaagctgttttcaaagcgtcacgagcacagttaaccggctacctaccgggtgcgcagatccctctaacctgcgcacccggcacctcaacccggcgtaaaactttgaaaacagcttccggatgcgcgtcccgagacacccaagggaccaatgatgagggtataaaactgtgcttgaagcctatcgcaaacacgtagaagagcgtgccgcccagggcgtcgtgccccagccgctgaacgccgagcagaccgcaggcctggtcgaacttctgaagaatccgccagttggcgaagaacaatttctcctcgatctgatcactaaccgcgttccggcgggcgtggacgaagccgcctatgtcaaggctggcttcctcgctgccgtcgccaagggtgaaacctcctcgccactgatcagcaagcagcacgccgttgagctgctgggcaccatgcagggcggttacaacatcgtcacgctggtcgagctgctggacgacccggaactgtccgataccacggcgcagcaactgaagcacaccctgctgatgttcgacgccttccacgacgtcgcggaaaaagccaaggctggcaatgccaacgccaaggccgtcctgcaatcctgggccgaaggcgagtggttcaagaatcgcgccccggtcgccgaaaaaatcaccctgaccgtcttcaaggtcaccggtgaaaccaacaccgacgacctgtccccggcacctgacgcctggtcacgcccggacatcccgctgcatgccctggccatgctgaaaatggcccgtgacggcatcaacccagacgttcccggttcggttggtccgctcaagcagatggaagagctgaagaccaagggcttcccggtcgcctacgtcggtgacgttgtcggtaccggctcttcgcgcaagtccgccaccaactcggtgctgtggttcttcggcgacgacatcccgaacgtaccgaacaagcgcgccggcggtttctgcttcggcaccaagatcgcgccgatcttctacaacaccatggaagacgctggcgccctgccgatcgagttcgactgctcggatcttgccatgggcgacgtcatcgacgtctacccgtacaagggcgaagtccgccgccacggcagcgatgagctggttaccaccttccagctgaaaaccgacgtcctgctcgacgaagttcgcgccggcggccgtattccgctgatcatcggccgcggcctgaccgaaaaggcgcgcgctgagctgggcatgggcccgtccgatctgttcaagaagccggaagcgccggctgaaagcaacaagggctttactctcgcgcagaaaatggtcggtcgcgcctgcggtctgccggaaggcaaaggcgtccgtccgggcacctattgcgagccgaagatgaccaccgtcggctcccaggacaccactggcccgatgacccgcgacgagctgaaggacctggcttgcctgggcttctccgccgatctggtcatgcagtccttctgccacaccgcggcctatccgaagccgatcgacgtcaccacgcaccacacgctgccggacttcatcatgactcgcggcggtgtttcgctgcgtccgggtgacggcatcattcacagctggctgaaccgcatgctgctgccggataccgtcggtaccggcggtgactcgcacacccgcttcccgatgggcatctccttcccggccggttcgggcctggtcgccttcgccgcagccaccggcgtcatgccgctggatatgccggagtcggtcctggttcgcttcaagggcaagatgcagcctggcatcaccctgcgcgacctggttcatgcgatcccctactacgccatccagaaaggcctgctgaccgtcgagaagaagggcaagaagaacatcttctccggccgtattctcgagatcgaaggcctgaacgagctgaccgtcgagcaggcttttgagctgtccgacgcctctgcagagcgttccgctgccggttgcaccatcaagctgccggaagcggccatcgccgaatacctgcagtcgaacatcaccctgctgcgctggatgatcagcgaaggctacggcgatgcgcgcaccctcgagcgccgcgctcaggcgatggaagcctggctggccaatccacagctgctggctgccgatgccgacgccgagtatgccgaagtcatcgagatcgacctctcggaagtcaccgagccggtactctgcgcgccgaacgatccggacgatgcccgcctgctgtccagcgttcagggcgagaagatcgacgaggtcttcatcggttcgtgcatgaccaacatcggtcacttccgtgccgccggcaagctgctggacaaggtcgaaggctcgctgccgacccgcctgtggctgtcgccgccgaccaagatggaccagcatcagctgaccgaggaaggctactacggcatctacggccgtgcaggcgcgcgcctggaaatgccgggttgctcgctgtgcatgggtaaccaggcacgcgttgaaaccggctcgacagtggtctccacctcgacccgtaacttccccaaccgcttgggcgatgcgaccaacgtgtacctggcctccgccgagctggcagcggttgcctcgattctcggccgcctgccgaccgtcgaggaatacatggtctacgccgctcagatcgacaccatggcggcggacgtctaccgctacctgagcttcgatcagatcgccgagttccgcgagtctgcggccaaggcgaagatcgatgtggttgcggtctgatgtactgagcctgcacacccgcctcacagacggctaaccccgtctgatgggtgaagcaagtgaaaaaacgccccgactggttcggggcgttttcttttctgcttcaggtggtgtgaatagactcaccatcaaagccatcaggaccagcgaacgtcatccgcttgttttgcggcctgagcgtctgttgcgtctgccactgcgccaaagccttcccggaggaagctttggcattggtcggcacgacgaacacgtcactgtggggcgcgttcgccgcggcgcgggtcccatgggcgggctagatgaatgcctgtcgagcacatcctcgcggaagccggtttcgccccggcaattgttccaggcgctgccgccattccagtcgagctgaccctttactggatggttcggcggtttgcgcgggggctccctcagtcttcgctaactttgcagccgctgcagccgctctcagctccgcaagggtcggtgtcttgcgtaccggctcctcgaccttcctctccacggagcggaggcagagcttgcacgatacctgggcagcatcttcggagctgttcagactcgagcctacgcgcccacacgcgatattcccttgggccacggagtaatgaatgaccaacgtgttgtctcctcaaatttcggggcgcgggattctacatggttgggcgcgtggatggtgcagggccagttcatcaggtagcgaacgtcgaagatgcgagacttcagtgaatcccataagcgttccccaagcgcaaggggggcgtgacatacccaaatcgcaaggaaggtagcggcaaatatgccttaagaaatggttgacaagacattcttatgcacattgcaacgcgactgacgtcagtattcttcggccccttttagctgcatcagcgcatgaggctaatgcattgattgataagggattttagaactgggtaaaaactcgacgatttgttgaagaggcccgtctggtaagcgctcggagcgatcatccagattatgtacacatgtttatccacagcttttgtggataacgaacgccaccgcaacggccttatcgggcagtcacagccggaatcaccagcgcccgcgacttggcagaagcccacaaagtcgtatggagaaaaaagacttaaggcggagcgatcacgctccgcctcgatagctaggcgccaaccctcatggcggcgatcatgaccttgcagacatcattcgaacccccagcgcaccgatagacgccacggttgccagcacgactactccactccagccccattggccaagcgccaagcttcctaaccctgccccagtcgccatgccgataaacacaccggtaaacagaagcgcgttcaggcggctgcgggccggtgggtcgatgccatagacaatcgcctggtgcgcaaccagtgttgcctggatgccgaagtcgaacccgatcgcggcaaccgcaatcagccccaactgcacttcgagcggcaccaggccaaccaggcccagcgcggcaaaggatgcggcggccaatgacgcgcccaggcaggtgacccgctccggaccgctgcgatcagccagtcgaccagccataggcgccgccagtgctcccgcggcccctgcgagcccaaacgcaccggccgccgcactgcccagtccgaattgggtgtgcagcattacggcaagcgtcgaccagaaggcactgaacgcgacggacaaaagcccctgcgaaactgcggcgcgacgcaacgccggatactgcgcccagagcttgaccatcgacccgatcaactcgcgataccccaaggatgtcgtgggtgaaaaccgtggcagtccgcgccagacgctagcgccgaccagcgcaaccgatatggcggccgtgccatagacgacgcgccaaccgaactgctcggcgatcagcccgctcaagacccgggacaaaagaatgccaagcagaaggccggtcatgactgtccccacagccgtcccacgttgcgtctccggcgccagtgtcgcagcagccggtacgatgtcctgagccatcgtggccgcgacaccgatcgcaaggctggcggcgagcaaggtgccaatgccgggagcgatactgctgagcaacagagcgagcgtgagcacgagcgccttcgccaagatgatccgccggcgatcgtagcggtccccaagcggggccagtagcagaattcccaaggcgtagccgagctgggtcagcatggggatcataccaaccgttcgttcatcggcatgaacatcttgcgccagcacacccagaatcggctggccgtaatacagggtcgcaacgctgagcccagcagccgtggccaacaacagcacgaggccgctcgaaagtgcgacctcgcccctttcgaatgccgatattttttgtgcgcaggtcatagcaatggctccagtgggttaccgtggagtcattctgtccttgcatagcagcggcttgtagtgggcttaaacgtagatccgtaatacgcttaacgcatgaacgaactcatagcccccgggctcgatcgcatcgaattactgcgaaccttcgtgcgcatcatcgatgccggcagcctttcggccgccgccgtacagctgaatacgagccaaccgacggtcagtcgccggctgaaggcactggagcgctcgctagggctgcagttactcaaccgctcgacgcatcgaatgcagctcaccggtgacggcgagcgctgctacgcctacgccagggacgtattgcacagctgggcggaaatggaagccgaactactgggcgctcgtgatgacccgcgcggcaagctatgcgttcaggtgccgcatgcctttggccaggaccagctgatttcgccacttgacgaataccttcggcaatatccgaatgtgagtgtcgagtgggtgctgcatgatcgcaggcccgatttcaccgccgaaggcatcgactgtgcaatccaggtcggtgtcgtcgaggatccttcggtagtcgccatccgtctcggcgagatacccaggatcgtcgttgcagcgccagaactgctgaggagcggagcctcgccggcatcgaccgaggacctgcagcgcctgccctggctggcgctacggacctactacaccgacgaagtcgtgctgacctgcatggccgatcagcgcaatcatcgcttctcgattcagccacgcatgagtaccgatagcctgtatgccctgcgtagcgcagcattggccgggcttggggcttgcgtcagctcggcctgggtggtcgcgcgggacatcgccgagggtcgcttgatccagctgatgccgcaatggcaggcagcaccgctgcccgtctacctgatttatccgcacgcacgtagctatccggccaagctacgcctgttttccgagctgatccgcaagcgcatgccgaaccttgtcggcctgaccagcggagagtctgggggcgacgaccgcagatgaagccatacaagagcctaaccaggctcacccagccgacgactcaacgaatgcacgaggccgttggctctcgcgtacggtaggccccggcacactgacgtcgggtgcattagccggcgctggacggacagcatcagcgctgtatcgccgggcgcacgagggcggccatcttcactcggcaaaccggcgatcaagaccatcggtagcgtccatcgattaagtcactagggattcgccaccatcctccgtacaatgcgcgcctcacatacgcaaccacatgcctgtgacaggcatccctcgcgtttatcgccaaacagcttggctgtcgtaacgacttctcccgtcccggtatgcacgccatcctgacggcggaggcgatcgaggtgagaacgctacgtatgggcccctgacgggaccaaacgcaaaatccccactctgaaacccgcgagaatactggctttgatttccaccgctaacatcacgatgcagttcggcgccaagccgctgttcgaaaacgtttccgtcaaattcggcaacggcaatcgctacggcctgatcggtgccaacggctgtggcaagtcgaccttcatgaaaatcctcggcggtgatctggagccgtcggccggtcaggtcatgctcgagcccaacgtgcgcctgggcaagctgcgtcaggatcagttcgcctacgaagacttcaacgtcatcgacacggtgatcatgggccacgaagagctgtggaaggtcaaggccgagcgtgagcgcatctactcgttgccggaaatgagcgaagaagacggcatggccgtggcggagctggaaaccgaattcgccgagatggacggctacaccgcggaatcccgtgccggtgagctgctgctcggtttgggcattccgctggaccagcatttcggaccgatgagcgaagtggcaccgggctggaagctgcgcgtgctattggcacaggcactgttttccgatccggaagtgctcttgctcgacgagccgaccaaccacctggatatcaacaccatccgctggctggaaaatatcctcacggcgcgcaacagcaccatgatcatcatctcccacgaccggcacttcctgaacagcgtctgcacgcatatggcagacctggattatggcgagctacgcctgttccccggcaactacgacgaatacatgaccgcggcgacgcagtcccgcgagcagctgctggccgacaacgccaagaagaaggcgcagatcgccgagctgcagaccttcgtcagccgcttttcggccaacgcctcgaaggccaagcaggcgacctcccgcgccaagcagatcgacaagattcagctggccgaggtcaagccatccagccgcgtcagcccgttcatccgcttcgagcagaccaagaagctgcaccgtcaggcggtaacagtggagaacgtcgccaaaggcttcgacggcaagaccctgttcaagaacttcagctttaccgtagaggccggcgagcgcgtcgccatcatcgggcccaacggcatcggtaaaaccaccctgctgcgcaccctggtcggcgagatgcagcccgacgccggctcggtgaaatggaccgagagtgccgagctcggctactacgctcaggaccatgccgacgacttcgaagacgacgtcaccctgttcgactggatgagccagtggacccagggaggcgagcagatcgtacgcggcacgctcggccgcatgctgttttccaacgacgagatcctgaagtcggtccgcgtgatttccggtggcgagcaaggccgcatgctgttcggcaagctgatcctgaaaaagcccaacgtgctggtgatggatgaaccgaccaaccacctggacatggagtcgatcgaagcgctgaatctggcgctggagaactatccgggcacgctgatcttcgtcagccatgaccgcgagttcgtcggctcgctggcgacccgcatcatcgagctgtccgactcgggtgtcaccgacttcagcggcacctatgacgactacctgcgcagcctgggcgtgatctgaccctgtcggcaaaaaaaacgccccgctcgatcggggcgttttggtatctggcgttagcggttttcgtttggctcaaagttgcagcagcaactgccgcaggcgctggaagtacagataatccagccagaccacctgatgcagcatgacgatcagccagaacacaagctgaaacgacagcttgcgcgtcttgtgccgcaatagctgctgggcgatcaaggcgccgggccagccgccgagcagctcgagcagatgcaggcgtgcctccggtgtgcgccagccattgcgtagcgcgcggcgcttgtcatgcagatacgccgcaaaggccaggacgctggccagcaggtaagcgagcagcagccagtggctcccctgcccggccaggcgcgcgaagcctgccgccggtagcaggcagagcaggacgaatcccaagagttttgccgacagctgtcgcgtcggcttgctcggccggggccgcttgcgcgcgtgaaccttggcagctggcgccggtttggccgcagcggtttgtgttccagatctgggcttgcgccgtatcgcgggctcgtcgagcgacaaacctccagccagacggatgtgtgtagcacgcaagcgccccttctcgtctggctcgctgagatacatcacctgatcgcccgctaccgggcggcgcgctccgcgcatcgccgagatatgcgcgaagacgtcaccaccgccgcgctccggccggatgaagccgaagcccttctgatcatcccagctgctcagctgaccgcgtagttccatggtgactggtccgggggaaatccggcgattctataggctaacttcgctgcgacgaagcctggctcaatgggacggcctgtagcgtctcccaagaaaatgcagcagatgcccgctgacctgctccgaatgctctccctgcagccaatggccgcagtcggcgatcagatgttgctcaaggtcgggcacccatgcgggcatcttctgcagggtatgcgcttcgagcgtgcccaccggatccttgtcacccagcaggaaaagcgccggctgctcgaccttgcgctcggccagcggctcggtgcgcgcccagttgcgttcgaagttacggtaccagttcagcgcaccgcgaaagccgcgtccttcgaatgtttcgacataaaccgcaaacgcttccgggccgcaccaggacggcggcgcgccgggatcctgcatgccctcgtaaagcgtgctgccggccggcttgtcctgaagaaagaagtctttgggtacagcggccgagctgttgtgcatcatcatccgcaaggttcgcgcgatatcctgatccagctccgcctcggcgacgccaggttgctggaaatagaggatgtaattgaagcgatcggcgaactggctgcgaatgatctcggtggcgggtcgcttgggccgcccgccgtagggtacggccatggcagctaccaccttgacgcgctccggttcgagcagcgccaagtgccaggcaacgggagcgccccagtcgtgccctaccacggcaaccgagcgctgaccgagccagtccatcgcgccctggatatcgccgcagagggttatcaggtcgtagctggccacattctccggagcgctgctctggccgtagccacgcatctccgggatcatcacccgatacccggcttgcgccaacgcctggatctgatgacgccaggaataccagcactctgggaagccatgcagcaaccagacaaccggcccgtctgcaggaccggcgcagtagagactgagggtgatgccgttgaccgctaacagttgatgctcgactgggtgcacgtggcctcctcggctggctgcgctcggcaggtcagcccgccgccgtgctccagtcgatcaggctgaactgccaggtagccaggatgatgatgccgaagatgatccggtaccaggcaaatgccgcatagctatggttgcctataaatttcagcaaggctcgcacggccaacatggcgaagatgaacgaggtaacgaaaccgatcgcgaacaccgggagatcagctggctggaaaagatcccgatacttgtagcccgaatacacagccgctccgaccatggtcggcatggccaggaagaaggaaaactccgtcgcggccttgcgcgataggccgaacaacaagccgccgatgatagtcgcccccgagcgcgaggtgcctggaatcaatgccaggcattgcgcgcagccgaccttcagagcctggctccagtgcatgtcgtcgaccgtctcggcctggactcggtgctggcgcttctccgcccagagcataaccacgccaccaatcaccagcgccgttgccaccgtgatgggattgaacaggtattcatggatgagatcggcaaaagccacgcccaggatcacggcaggaaagaacgcgacgagcagattgccggtgaacttctgcgctggtttctttgttggcagccccaccacgacatcgatgattttgctccggtattcccacaccaccgcgagtatcgcgccgagctgaatgatgatgttgaaggcctgtgcccggtccccgccgaacccgatcaggtctgccacgatgatctggtgtccggtgctggaaatcggcaaaaactcggtgatgccctctaccacgccgagaagcaacgcctgaaaggcaatccaaagatccatcttgtccccaatggcggtggcttcaccgcagctgatgtacaacgaaggtatatgtcagatagccatctgagcgctgttctgactcgattgtgccaagtaaattcactgagccgatgcgctcgcgcctcatcttttccagactcgtgccgacacgctaaccaatgggcatgacaaacgatcccgccacagcctcctcccggcagaccgtatcgccgcgctccaaccgacattcgaataataaagaagaatccgccttaacaggagcttacaagccaatgactctgctaagaaacctcccgatcagcaagcgcctctggctcataccgctagtggctgtcgcgatgctgttcatccttggcttgttgatgatccagcaggtacggaccgacctgtacaagggcaagcaggtcatgacgcgcaacatcgtcgagacggccaacggcattctcgattattaccagcagcgcgaagcaagcggcgccctgaccaccgccgaggcacaaaaggccgcgatggatcagatccgtctgctgcgctacggacagaacgactacttctggatcaacgacatgaccccggtcatgctcatgcacccgatgaagcccgagctcgagggcaagaacctctcggccgtgaaggaccccaacgggaaggaactgttcaacgagatggtcaaggtcgcccgggcacaaggtgccggcctcgtcgattaccagtgggcgaagcccggtgccgaggatccggtcccgaagatctcctatatcgagctgttcaagccttggggttggatcatcggctccggcatctatgtcgacgatgtggaagcggagttccagcgctatgtggtgcgcttctcgatcatcgggctggccatcgccacgctgatggcgttgctggtcgcgatcctgatccgcagcatcacccaaccgctgcgacactcgatgcaggccatggccaatatcgccagtggcgaagccgatctgacgcgcagcctcgacgtatccggtaacgacgagctgacgaccctgagccgcgacttcaataccttcacccacaagctgcgcacggtcatcgcccagctgttcgaaacgtccagctccctggcccagtcgtccaacgcgctcggcggtctggctggcgaagcgcatcagcacagccagcagcaatcgcaacagatggagctggtggcgactgcggtgaacgaagtgacctatgccgttcaagaggtcgccaaaaatgccgaacaggcgtcgaacgaggtcatggatgccgagaagcaggcgggacaggggcaacgtaacatcgaagccagcctgcaacagatcgaccgactgtcgatcaccatcaacgaggccgttggggtcatccagtcgctcgccggcgaaaccacgcaaatcggctcggtgctggaagtcatcggatcgatagccgatcagaccaacctcctcgcgctgaacgcagcgatagaggcggcgcgagccggcgaacaaggccgtggcttcgccgtcgtcgccgacgaggtgcgtctgctggcgcagcggacccagacgtcgaccgcggaaatccatacgatgatcgaacgcttgcagaagaactcgggcgacgccgtaagcgtcatcacccgcagcagccaggcctcccaggctacggtggaacaggcaagccaggccggggaaagcctgggccagatcgcccaggcactgcgtaacctgtccgggctcaacgcctcgatagccagcgccacgctgcaacagactcacgtcgtcgaagacatcaatcagaacgtcacgcaagcggcaggcctggcccaccagagcaccatggcggcagagcaatcgagtgccgccgggcgccaactcggtgacctggccgagcagttgaaccggctgctcaaacaattcaaggtctgaaccagcgctcgtttgtatacacaggccaggctcggaacggagcctggccgtcccgctgggattttcaattgcggcttttcgccacatccccagctaagtcaggaaggccgcccagcgccgaccggcgaagtctgttccgccacagaaacgccctattacgcggcttgtggccatttcctaaggcctctcgagccatccaagcgccgtcatactttcggctaattgcaaaaaagtcgaccaatcgcgaaacaacggtgtgacttatcagtcctctgtgtacatcaatggatatgtaaggccaacgccggcagcctggcggcaggctcaaatccgatttttggtttaccacacagagagacatgcccgatgaacagcccgcttcgtttcaacgacgcccttcttatcactgaccgtgcgttcaagccgttccagtgcgtcgcttggacgctgctggaaggcaacggcgatctcagcattacagtcgttgacagcagcgaatcccgccctgtcggccattgcaaactatccagcagcgtctacaccgacccggtcaaactgggtgaaacgctggaacaggcacgcgccgacctgagccgccagggtgctcacctcgccccttggcatatgcctgaataacagtcgtctccaacaaaaagcccggctgcgcaagcgccgggctttttgctgccccacatctttgcacctcccggtcgcaccggctgactgatccattcgcttgtttcacggtctgagcaataagtgaaacaagaggagcaagccatgaaaggtgcacaggcctatgtcaatgatcaatggcacagcagcggcttggccgacctgccgaagggtccggaaggccattgcgtcacactgaaattcatcgtgccccgcgatgcccaaaccaccgggctgatcgtgcatatgcgcgacgtggcgcaacagcgcctgtgcgagttttacggcagccgccaggtaacgcccagaccagtggaaggctcggtcgtcggcgacggcagcggtgacggcatcaacctgacgttcgacgtaacacccgctgaataagcgacccagccggagcgaagagcatgtgtgcgcaacgtattgaaatcgatgaagccatgcgcatcagtgaaatggcctttctgccttgccacgcgacaaccagcgcggacagcaatgacgccagcttctcacttcgggtgttcgatgacgctggcgaggagcgcatgtcgatcccccatatcgcccgcacgcaatacagtgatcccacccacctcgccggcctgctcgaaggcgcgcggctgcagctcagtaaggacggactggcgctgagcgcttggtcactgcccatataaccaggcatcgacacctgaccggacgcaattgctggagatcgaatgacgcctctggattggcagcggatgctgctcgacaagttccctcccctgttcatcgtcgaagtggggctgcgagccctcttcgcctatgtcgcggtgttcgtgttcctgaagatcagcgggcgccgggggattcggcaactgtccctgttcgagctggtcgtgatcctcacgctcggctcggctgcgggggacgtatcgttctatgaagatgtgcccctgatcccgatcgccaccgttttcgccacgttactgttgctctacagattcacggtgtggctgatgacgaaaagcgagcgattttcccgctggatggaaggcgtgccggtgacgatcatcaaggacggcctgtacgaactgcacagtctgcagcggctgaacatctcgtccggggagttcttcatggagctgcggcaacgaggcgtcgaacatcttggccaggttcgactgggcattctcgagaccgacggcaacgtcagcctgttctacaacgatgccgagtcggtgcgcccggggctgccggtgctacccgaagcctacaggccgaactactgccagatcccgtccagcgggctctatgcctgcacgcgctgcggctttcctcaggtcatcgagacgcagcaaacggcagtttgccctcgctgcaaaaactcgcaatggacgctcgcgctgaccaaccctcgcgggcagtgagcccaggtcgcgaacccccttcgcttgcgccggtcacttatagggacgggcccgcgctgcaagcctgcgtggtcacccatacctaccgcgacccaggagcgttcacatgataggcgactattcctcgataaatgatcatctggaaactgcacgcaagctggcggacagcgccgagacgaaggcggatccggccatttaccgcgaagcgatcgacgagctggtcgccgcgatacggttgctaatgcgcaacagccaggagagcgaagactgacggcaatcggttaaccgcaccagcacactactgtgcgtgacgagacaacgcccggcagcgcggtcgcgcaccgatcgctctgccgggatcccaactgaagaaagcccgaaccctgacctcggcgtacgaggagtttgccatgctagtcgatcaagacggtgcagctccgctgccgttggccgaagggattcgtccggtcccagcggacgagcaacctgacacgggtacggcgctctgcccgccgctttcaaccgacctgcattacgtcgatgaccgcagcccgggcattacgcgccgcgtagagaacggcaagttcgtctactttctgccgtctggaaagcgcatccgggacgcggctgagatttcgcgcatcaacaagctggccataccgccggcctacaccgatgtctggatctgccctgacgctcggggccatatgcaagccaccggccgggacgcacgtggccgcaagcaataccgttaccacccccgctggcgggagatccgcgacagcgacaagtacgagcgcatcctggccttcggcgccgccttgccgcgcctgcgcgcagggctggaaaagcatctcgccctgcgcggaatgcctcgggaaaaggtcatggccctggtggtgcaactgctcgaaaccactcttatccgcgtcggtaactcgcgctacgcccgcgagaaccgctcctacgggctgaccacgttaagaactcgccatgtggcggtgcgaggcgctgccattcgcttccagttccgaggcaaaagcggcgtggagcatcaggtcacgctcagaaatcagcgcctggcgcgcattctgcgtcgttgcatggagttgcctggacagcatctgttccaatacctggacgaagcaggagagcgccacccggtaagctccaacgacgtcaatcagttcatccagcagatgactggcggggatttcaccgccaaggactatcgtacctgggcaggcagcgcgctagcgttggagtcgctgcgcaaacgcgaatggcagcctgaagcggtcgctcgtcgccatcttgtcgagacggtcaaggaggtctcccgacagctaggcaatacgccggccgtatgccgccagtgctacatccatccggacgtgctggacgcctttgccggcggcgagctggcacgcttgcccagggcgagaaaacgcaaatggctcagcagtgaagaagttacgctgttgaagttcctcaccgagcgccagccgaactgagccaaccttagcgatacagcgagacctggttgcgaccgcccgccttcgagctgtacagcgcgctgtcggcgcgttcgatcaactgtgcatagccgctggtgggctggctgaggtcggcgatacccaggctgacggtgaagtgaatgcggtgattttcgtaaaccaccgcgtgcgcctcgacagcctggcgaaaccgttcggcaaacgtcagtgcgccgtcgctatccgtatcgggcagaaggaccacgaactcctcgccaccgtagcgacccgcgatgtcggcatcgcgcatgcactggcgaacgagttcggcagtctgctgtattacggcgtcgcccgcctgatggccgtagctgtcgttgatcttcttgaagtgatctatatcgaacatgaccagcgccgcattgcggtcgtatcgccgatgcctggcatactcttggcgcagcatctcttcccagtggccacgattgaacaggccggtcagacggtcggtgctggacagccgttgcaattcccgattcgccgcctgtagctggcggcggttggtggccacatcggttacgtcatagatgatcaaacaaatctgctcgatgcgcccgctgagccccttcagcggcatcagggtggtgttctggtacatgaagtcttccagcccggtgatcggctggtagttcttgaatcgcagcagatagggcctttgctcccagatggtgaacgaaggggtgccgagcgtcgcgacgttctccaccttgcgccggaaccacgactcgtccacttcggggaacagctggaaaaacgattggccttgcacgtcttcgggcgggtggccagagcggttctccataaaagtgttccagacctcgatatggtactgacgatccagcaccacgacgccgacgtcgatgctctggacgatggtcagcaaccaatggagctcgctcagattgacagattcggacatggctcagctcatcaggtgggcgagtttgcgagtcagcagttcaaccgagtcttcggtgaacaacagcagaaggtcgaagtgaacatcatgcccttccaggctgtagctgatttccaccgccagggtatttttccagcgctggctgttgaggcggatcagttcgtcgatcgaggcgtgctggccaagaacctgcgggtgcccttgtgaaaacaccacatcgatctgatcggcgatgccgctgagacaggcactgatcagcaggctcgacagatcgagcagcatctccagctccaggtagtcgtcggcgcgcatcagacgcgccatgtcggccacttccgagtcatgaaagatgagcaatgcctcaccggcgatgcctccgccaatgtaaccctggcaaaccgcggtcagcttgtctccctgggccgcatctgcgagcgccatgtgcagctcgccgacctccaggatattcacgttgggtatgggcagttgcacgaataccccgagcacccttgcgagcagcgctgcggcgcgccccatcgcaacgttgactacctcgcgaaacgcatcgcgaaagacgatcggaccagccttccgttcgcctagaaccggcaacccatcgcctaccagcccggcgccggccagggtctgctgcaggtgcgccggatcagcgggtttgcgaatgaatgccagcgcacccaggtccaatacgcgccgaacggcctcctcctgaatgtcggccgatatcacgatgaccttgcaatcaagatgctcgtcgcgcagggcggccagcacctgataaccgtccaggtcgggcatggtcaggtcgagcaacagcacgtcgatgccgccttcgcgaatgcgttcgagcgcctccgcgccgctcgacgcctggctgatgttcagcggccaggtagccggcagggcgcgcagcaactgcttgcgcgccaggctcgaatcatcacagatcaacagagatacggcagacatgcggcgctcgctcacttagtcaggcctcggaaacccgggcagcttatctcagcgaacgggcgccgtaatggggcgctggaacaatagtggcactttgcccctgaagatggcgtaaacagcacgcgccgatagcgatgacctagtagtaggcgttgtcccggttggtgtggtcggtgacgtcccgcacgcccttgagctcggggattcgctccagcaaggtcttctcgatgccttccttgagcgtaacgtcggcctgaccgcagccctggcagccgccgccgaactgcagaaccgcaacgccttcgtcgaccacgtcgatcagggtgacctggccgccatgactggccagacccggattgatctcggtctgcaggtaatagttgatgcgctcgttcagcgggctgtcctcgttgaccatgggcaccttggcgttgggtgccttgatggtcagctggccgcccatgcgatcggtcgcatagtccaccagcgcatcttcgaggaagggttcgctgacgccgtcgatccaggcggtgaagcgcttcagcgcaacaggcacatcgtcgggcttttcctcaccaggcttgcaataggcgatacaggtttctgcgtagggtgtaccaggctgagtgatgaagacccgaatgccgatgcccgtcgtattctgcttttcgagcagatcggcaaggtaatcatgtgcagcttcagtaatggtaatggcgctcatgggaactcctctcagatatgctcgaagtgtacgccaaggaatgctccggataaagtcctagcgttttagtaggaattgatcgattcaaaggttctggtatcggttcatgtccagcacgcccgcctcgacaggatcggtttcctggagatagcgagccagatcgttgaagtactgccagaacgcgggatggctacgccggatcccccagcgatcgactatatgctcgaacgcctgctgatcctttgcctgctccagcgccgcgacgaattccggaacctgtgaggcctgaaggttgaagaggaagttcgggtagctgctcaggatgccgggatagacggtcagggtgtcgagccggggctggtagcgatgctcctcgccgaacatgaacgctacgttgctgtgcgcgcggtttcgcagaaggctgtacagctcccgctgcccttgaccgaactcgatgcgtagcagcgtcgcctcgggcaactgatcgacgaccggcaggccggcggcaatgcggttggagagccggctcaaggcttgctcggcggcctgtaacggagcgggcgcctcgctgcggtagcaatggcccgaggtgcatcgattcatcggatcggccgctgcatcgatggccgcgtgacgctccaggagctgttccacgaagcgctccttgggcttgggcgtctccagcgccagcgctgacggcgtctcgttgtcgatattcgtataggccaaccagagcttgagcttgccgctgttctcgtaccagtcgtcgagtatcgtttgccgcgatcccgccggtagcaggcgaaggaagttgagctcggcgccgttgcggatcaagtcgaagtacaggcgggtctgcccctgatgcgagacgttgccgaacacgtcgaaattcaccacaagctggtaataggttcgctcgagcagcggatagtccatccaccagagggtttgcggcacctcaccgatgagccctttgcgaaccgaagcactgtcgtgctggcgaaagaccgtcagcagtgcgttgtcgttgccactccagatgtcctcccactgcgcagggctttgcgcataggcgtcgccccgcagtttttcgtactggttgcgcttgctttggtagcggtgccagaaccccagcaactcaccgatatcatcggcctgccctggcatcgccagcagaggtgtcgcacgctggcgataacgggcgtcggtcaggtagcgatcgtgccgaggatcctggaacagcacccagaagttgtcgcggatgacgtcggtggcaatctgcccacggcacaccggcccgcggatgaaggtgcgtacgaagtattcggcattttccagcatgaagcggtagcgcgcctcggccggtatcgcctggaacgtctcgaacggattggcacgatgctggacgccatatccaggcagcttgtcgagcgtccagtcgccggcgagcaacaactgatgaacccgcgccagcttcgctggattcagcggataggtgatgtgcgtcttgtgcacaatgacgcccttgatgggcatcaggcgatagtagaaagccgtccccggatcctgattcggtgaatgggtggcgatgacatcgaccggccgaccactgggtgtacgcgaccttaccagctggaagaaatggcccgtcttgccagcatcgaaatacagatgcgcgatgaacagatgttcgtagagccaacggctgaccaacgcctgccgcttgccttccgcattgagcattcgctcccagctggctacctgcgcagcctcgctgggcgatggcacgtaggcgctctcatcgaccggtgcgccttgcgccagccactgctgcagcttgtcatattcgccatccgtcaaaccgctgaccgcgaaaggcatgccagcgtgggcatgattgccggcataagcggaaaactcatcgggtagcgggcagctgttgtcgcggccgataccgatgtccaggtccgccggcagcttggcgttggccggcaacggctggctgcgaccaagctccagcatgcgtgtcatcagcgccgcctggcccgcctgcggctcgagcaccgaatagaatccgcgacgacgccagtccgcctcggcatgcgcatcgagataaagccggcttggcggctgcgccttggtccgggtgccatcgtagaccggcagcttgcttgcgccacgcgacgcgccctcgccgctgcccagattgagctggcacggcgaatcgtagcaggcatggcaggcgacgcacttggcggtgaagatcggctggatatcgttctggtagctgagcgattgtgcccagccggggtcaaccagcgcgaacgcaagcgctgcaagcagtgcacgacaggccatggtcccgctcctggaaaatgagccgggcatagtagccaagctgccgatctagagcgaacccgatggtacggtccgggcctgcgttcggcctgcacaacatgagcgctgttcatgaaaagctgccagtgatcaaaatgcgtgcagctttgatatcattgccggtcctcgcaaccagcttcaggtagtccccatgctcgaccgcaacgcccgtctccaggcactccagcaggcgctcaaggagcgcatcctgatactcgacggcggcatgggtacgatgatccagagctacaaactggaagagtccgactaccgcggcgagcgcttcgccgactggccgcaggatctgaagggcaacaacgatctgttgatccttacccgaccggacgccatcagcgctatcgaaaaggcctatttcgacgcgggcgccgacatcgtcgagaccaatactttcaatgctacccgtgtgtcccaggccgactacggcatggaagagctggtctacgagctcaacgtcgaaggcgcccgcctcgcgcgtcaggcggcggatgccaaaaccgccgagacacccgatcgcccgcgcttcgttgccggcgtgctcggcccaaccagccggacctgctcgctgtcaccggacgtgaacaatcccggctaccgcaacgtcaccttcgacgagctggtggaaaactacaccgaagccacccgcggcctgatcgaaggcggctcggacctgatcctgatcgagaccatcttcgacacgctcaatgccaaagcggcgatcttcgccgtgcagcaggtgttcgaggagatcggcttcgaattgccgatcatgatttccggcaccatcaccgatgcatcgggccgtaccctgtccggccagaccaccgaagccttctggaactcggttcgccacgccaagcccatctccgtcggcctcaactgcgccctgggtgcgaaagagctgcggccctatctggaagaactgtcgaacaaggccgaaacccatgtctcggcgcaccccaacgccggcctgcccaacgccttcggtgaatacgatgaaagcccggccgagatggcccgggtagtcgaggagttcgccgccagtggcttcctcaacatcgtcggcggctgctgcggcacgacgcctgcgcatatcgaggcgatcgccaatgccgttgcgaagtacgcaccacgcgtccttccggacattcccaaggcgtgccgtctgtcgggtctcgaaccgttcaccatcgatcgcagctcgctgttcgtcaacgtcggtgagcggaccaacatcaccggctcggcgaaatttgcccgtctgatccgcgaagagaattacaccgaggccctggaagtcgctctgcaacaggtggaagccggcgcgcaggtgatcgacatcaacatggacgagggcatgctggattcgaagaaggccatggtgaccttcctcaatctgatcgccggcgaaccggacatctctcgcgtgccgatcatgatcgactcctccaagtgggaggtgatcgaagcgggcctcaagtgcatccagggcaagggcatcgtcaactcgatttccatgaaggaaggcgtcgaggccttcaagcatcacgcgcgtctgtgcaagcgctacggcgccgccgtggtagtcatggccttcgatgaggccggccaggcggatactgccgagcgcaagcgcgagatctgccagcgctcctatgacatcctggtcaatgaggtgggcttcccgcctgaagacattatcttcgacccgaacattttcgcgatcgcgaccggcatcgaagagcacaacaactatgccgtggacttcatcgaagcctgcgcctacatccgcgacaacctgccctacgccctgacctcgggcggcgtgtccaacgtgtcgttctcgttccgcggcaacaacccggtacgcgaggcgatccactcggtcttcctctactacgccatccagaacggcctgaccatgggcatcgtcaacgccggccagctggagatctacgacgagatcccgaagaagctgcgcgacgcggtcgaggacgtggtactaaaccgcacgcccaacggcaccgaggcgctgctggccatcgccgacgagtacaagggcgacggcagcgtcaaggaagcggaaaccgaggaatggcgcggctacacggtcgaaaagcggctggaacacgcgctggtcaaaggcatcaccacacacatcgttcaggacaccgaagagttccgcctgcaatgcgcgcgcccgatcgaggtcatcgaaggcccgctgatggccggcatgaacgtggtcggcgacctgttcggctcgggcaagatgttcctgccgcaagtggtcaagtcggcccgtgtgatgaagcaggccgtggcgcacctgatccccttcatcgaagccgagaaaggcgacaagccggaagccaagggcaagatcctcatggctacggtcaagggcgacgtccacgacatcggcaagaatatcgtcggcgtggtgctcggttgtaacggctatgacgtggtggacatgggcgtcatggtgccagctgaaaagatcctgcagaccgcgatcgccgagaaatgcgacatcatcggcctgtccggcctgatcaccccgtcactcgacgagatggtccacgtcgcccgtgaaatgcagcgccaggatttccatctgccgctgatgatcggcggcgcgaccacctccaaggcgcacacggcggtcaagatcgacccgcattacaagaacgatgcggtggtctatgtgaccgacgcctcgcgcgcagtcggcgtggccacgacgctgctgtccaaggaactcaagccggtttttgctcagaagacccgcgaagagtacgcgatgatccgcgagcgcacggccaaccgcagcgcccgcaccgagcgtctcacctacgaagaagccatcgccgtcaaacccaaattcgactggtccgagtattcgccggtcaaaccgacctttaccgggcgcaaggtgctggaagacatcgacctgcgcacgctggtcgactacatcgactggacgccgtttttcatcgcctgggatctggccggcaagtacccgcgcattctcgaagatgagatcgttggcgaagccgctaccgcgctgttcaaagatgcccaggcgatgctcaccaagctggtcgacgaaaagctgatcaaggctcgcgcggtcttcggcttctggcccgccaatcaggtggatgaagacgatctggaagtttacggcgatgacggcaggccgctggccaagcttcatcacctgcgccagcagacggtgaagaccgacggcaagccgaacttctccctcgccgacttcgtcgcaccgaaagacagtggcgtcaccgactatgtaggcggcttcatcaccacggccggtatcggcgccgaagaagtggccaaggcttatcaggacgccggcgacgactacaactcgatcatggtcaaggcactcgccgaccgcctggccgaggcctgtgccgagtggctgcaccagcaggtgcgcaagcaatggtggggctacgacccggaagaacaattgagcaacgaggagctgatcaaggagcagtacaagggcatccgccctgctcccggctacccggcctgcccggatcataccgagaaggccacgctgttcgaactgctcgatgccgacggtgccagccaggtaaccctgaccgaacacttcgccatgctgcccaccgctgccgtcagcggctggtacttcgcccatccgaaggcgcagtacttcgcggttggcaagatcgacaaggaccaggccgagagctacagcaaacgcaaggggcaggatcttgccgtgaccgagcgctggctgatgcccaacctcggttacgacaactgagcaagctggccgggcagcagctgctgcccggtcaacttcgctccaacccaatcactacacgaagcctgcgatgcctaccgaaacccgctatctgctcgatgaactgcaaaccgccgatatgctcgaggtcgacggcctgcatgcctggcaattcaccctcaacgacgagttgctcgaccgcgccgaggccgccgcgatcgctggcgaacccttcgccagcgacgacatcgtggttcgcatcgagtcgatcgatggccgcgagcgacggcagtgggcgttcagctacaacagcgtgatggaggccaactggtgcgaagacgatcagtactggctcatcggcgatgcagcgcagacgcgtgtgcgatgcctcggcgccatcactgccagcgctgacgacgaatagatcaccgcaactgaagtcgagtgggcccccttacagactcgataacgggatgccagggcgaatagcggcgacaaggcacgtgcgccagcctggccggcgcagcgcaactgcccgtatcagtcatggttcgcgccacgccgtagcaacagcgcgatggccagcactaccagcaagctacccggcaaccaatgccagccgatccgttggggttggccgatgaacagcagcagcatcgatacgaacggaaccagatagctatacgcggtcaccgcccccggggtcagcaccgccgtggcccgctgctgcaggaagaaggtcatgccgctggaaaacacccccagatagatcaccagcgcgacatcacgcaggtccatccgtgccagtgcctccggttgttcccagacgagcccgagcgcgccgatcagcatggcccccatcagcaggctccagaacgtgcgcaagccggcctgtggcgccagtacgccgcgctgcaggccccacttactcagcaccgggtacatcgccgaggcgatacagccgaagaagaacgccagctcgccaaaaccgaacttcagttgcgtaaggtcgccattgttttcggccaccgccagccccagcgcacccaacgcccccagcgccagaatcgccagcagtcggcccgcgggttgttcgacacccaggccgcggccgatgcagtaagccagcagcggcacactgacgaacagggtggccatcgacagggcgctgacacggtgcgcggcccagaacatggtgccgaagaagccggccaggctcaggcccatcagtgcatacaggagcaaccccgacaggcttggccaacgttcgtcctggcgcagcagcagaggcaacaatgccagggctgcaatgctgaaacggatggaggtcagcagcaacggcggcaagccttcgctcatcagccccaccgcgggaaaggaaagaccaacgaacagcgcccagagcagcatgcccaggtgcgcacgggtggtgccacgcttcgcttcagtcatcgccctgctcctccagtgcccgcagcaggatgcgcagcccgcttgccaagacctgccgctgctccttgtcgagcggtgcctgaatgtcatgcaacgtcgccaagtactcatcgagacagccgagcaatacggtttgcccttgatcggtaaggcgtatcaacaggctgcggcgatcttcgggattgggaacgcgctggatcagcccggccatctccagtcgatcgagccgattggtcatggctcctgaactgagcacggcggcgtgtcgtaaagcgttcggtgtaagcccttgaggttgaccgctgcgatagagcgtcgcgagcagatcgaactcgccgtcatgcagtccgtgcttgcgaaatacagcagcgatgcgtcggttaaggtatttggacaaccgatacacgcgcgtaaagatcgccatcggcgatgcatcgccttcaggacggacgttttgccactgagcgagcacgccatcgacgtgatcgccacctttgggcttacgcatagatatctccacaaaaagaatctttacgtgaagctagttaaacggagaaccaaaggcaagcgataaccttgcaggcggtgaattgagcgacgagtgacgttcggccgcccaaaccgggcggcagccgaggctgcgcagccggatcggcagggttacttcagctcggacggcgaattgcggacgatcttgatcgaatgtgtgagcgtcggcttacgagtgacgctgatggccttgcgcgtcaccgtgtcgatggtgatgttccaaaaaccggtgttgggcaccttgatcttcgcgggaaacttgtcgaaggcgccgccatgataggtatgccggccgccgttcttgaagctgcggaagttcttgtcgttcatcaaacggatattgcagggctgcgaacagtcgatgatcacgaagtcgtcttcgttgaggtgttcgcgctggtgaatgaacttcatgtaccgctccggaccgcgttctggcaaagccgaagattaccatgcgagtggtcgcctctgcgcaagccgagcctgctgtaatttgacacaatggcgccgcctgaccggctttggcgctggtgccggcctcacttctgctgatcaaggattcccgcgaatgtcggcggcgccccttagcgttgatgccacatcgcccgctgcgcgccgcgccgctcgggtcggtttcttcatggccggtttcggtctgtccgtctgggcgccactggtgccctatgtgcgcgagcgcatcgagatgagcgatgccctgttcggcacgctgctgttgtgcatcggtatcggctcgctgacctggatgccgttgtccgggttgttggtgagccgccgaggcatccgcccagtggtgctgtcgagcgtggcgctactgcttttcgcgctggccgcaatggcgctgaccaaatcgatctggttcctcgccttggcgctgttctgcttcggtggcagcctcggagtcatcgacgtggtgctcaatattcagggcgtgctgatcgagcgcggcaccggcaagcggcacatgtcgaactttcacggcatgttcagcctgggatcgatctgtggtgcgctggcgctcaccggcgcgttgaccctgggactcgcaccggcaaccggcacattgttgatgatcgccgcaatcgcattggccaaccttgctgtggcatccggatttctacgggacagggcaccgggcggcggggtcgccctcgtccgccccacgggcatggtgttgctggtgggcgccctgtgcttcgtcgtctatctggccgagggcgcagtgttggactggagtgccctgtacctcaccgagcacaaggcattggaaaccgccaagggcggactgggttacgcaagcttcgcactgatggtaaccatcggccgcttcgccggcgcgccggtggtaagcagcttgggaaccgcgcgggttatcggcttcggcggcctgctggcaggggtcggtatcggcctgaccatcctgaccgagcattgggggttcgccctcctcggctacggcttgtgcggcctgggctgcgctaacgtctcgccggtattgatttcgtccttgagccggcagcatgacatgccggtgcatcaggccatcaccgcggcgaccaccatcggttttgccggtgtgcttgccggcccggccgtgattggcgtgatcgctcactatggttcgctgacgctcgctttcggtctgctcgcattgctgttgttcgggctcgtcctgggcagccgccgcttcaaggaatgaatatcaccgaggcggcgcctggcaatcttcacctcgctacagaccaggcctcggcctttggctagaatgcgcgccctatgcgtatccaagaccttcatcagcaactcaccgagatcggcgccaagcccattcatatcggccgggtgacgcgcgcctggctcaagggccaggcgctggatgccggaacacgccatcagaaaaccgaagacttcctgccgctgtcggtgcgcaacggtctgcccgcggtcagcgacgccctggatggactggtccggctccgctcggaacacccgggcgccgatggttccgcccgcttgctggtggagctggcggacgggcagatggtcgagagcgtgctcctgccacgcgatgggctctgcgtgtcgagccaggtgggctgtgcggtgggctgcgtattctgcatgaccggcaagagcggtttgctgcgccagctcggcagcgccgagatcgtcgcccaggttgccctggcccggcgcttccgtccggtgaaaaaggtggtgttcatgggcatgggcgagcccgcgcacaacctggacaacgtgctcgacgccatcgatctgctgggcactgacggcggcataggccacaagaacctggtgttctccaccgttggcgatccacgcgtgttcgagcgtttgccgcggcagaaaatcagacccgcactggcgctgtcgctgcacacgaccgatgcagcgctgcggcgcgaactgctgccgcgtgcgccggtgctcgaccccgccgagctggtcgagttgggcgaagcctatgcgcggctggtcgactatccgatccagtatcagtggacattgctcaaaggcatcaacgacagccaggacgagatggacggcatcattcgcctgctcaagggcaagttcgcgatcatgaacgtcatcccctacaacagcctcgacgatgacgagttccagcgccccgaggccgagcggattcgccagatcatgcggtacctgcacgacaatggcgtgctgaccaaagtgcgcaattctgccggacaggacatcgaaggcggttgtgggcaattgcgtgcccgcgccgaacgcatcgtgcgcgaccgccgccaacccgcgcaaacctccaggccagagccgttgcgctgaacaagtagcgcatgccgttgtcctagcgcgactgagtcgaaccagcccccaacgggccgataccgacagcggcgatcgcgcaatcacgcccgcaacgggcaacgagaacagcatgcacacactggaacaattgaagcgcggtgagctgaccggcatcacccgtctcgacctgtccgaaggactcgagacattcccagcggaaatcttcgaactggccgatagcctggaagtgctgaacctgtccggcaacagcctgaccagccttccagaggaccttccgcgcctgcataaactgcgcatcctgttctgctccgacaacgccttcacctcggtgcccgccgtgatcggccgctgcgcccagctggaaatggtcgggttcaaggcgaaccgcatccgcaccctgccggctgaagcgctcccgcctctgctgcgctggttgatcctcaccgacaaccagctcgaagcgctgccctcccagatcggccgctgccaccgtttgcagaaactgatgctggcgggtaaccggctgcgtgcacttccggcatcgcttgccgactgccagcacctggagttgctgcgaattgccgccaaccagctctccgcccttcccgcctggttgctgcagatgccccggctgagctggctggctttcgccggcaatccgttcagcgacaagatggaggccgagatcctgggccagcatcccttgccgcccatcgatcgggcgcaggtcgcgttcgaggatgtgcttgggcagggtgcgtccggaatcatccatcgtgccgaatggcagcggccgggcaacagcggacaagccatggcggcgaagctgttcaaaggcaagctgaccagcgacggcttgccccatagcgagatggccgcgagcatcgcagccggcacgcacgccaatctgattccggtcgccgggccactggccgagcaggccggagcccttcccgggctgctgatgacgttgatcgacccgtccttccaagtcctcgccggtccgccatcgctgtccagttgtacccgcgactgctatccagagaactgccggttcagccctgcgcaggtgctccgtatcgcagccagcgtcggcgctgtggtcgcccacctgcatgcgcgaggcatcctccacggcgatctctacgcacacaatctgctggtcgatccgcacggccagaccctgctcagtgatttcggcgcggcatcgttcttcgacccgcacggcgcgcaggcgcccgccttgcagaggctcgaagcacgtgcgttcggatgtctgctcgaagagctgttggcgcattgtgcaagcgccggggacgatccaacgctgctgcgcctaggcgagctgaagcgtcgctgtctgctcgacgctatgcatgaaaggccggatttcgctcaactgagccgggcgctcgaaacaatttgcgccggacggcccgatccggccgattagttgcatgagggagtcgtcctttcccgttctgacggcttcctgacgcatgtctcacttcgaaccacgcgataccgacacacacgcccagtcgtccgccgccaacgctgcgctggagcacgaccctttcatcgtcggcctcaagcaacgattgcccgaacacctgcgtgaaagctttaccgaacagcagttggaaggtttgcgcagcgccttcgccacgcgctcctggggccgccacaagctcgactggcgcggcaccttcagcctgtggagcaaccagtactatttcgtgctggttggcgggcgcaacaaacgcaacctgtcacgcgcgcaacgcaacctgtccctggccgcaaaagcgggcgcaatcaccttgttcctgttcttctccgtgctggtcggtctggtggtgctctatctgatcaagtcggcgctcgggatcaacctgttgccgaactattcgctagggttgtgggactggttcaggggcgcacgctgatcggcgtcagtcgccgatcaggatgagtttgccggtcgctggatcgcgatagacctgtccgacactttccaggcctttgccggagttgccctccaggctatccggcagccgcggcagctcgcgcccgcgctcgaccgtcaccggctgcctggcggcatcgagccgttcgaggagatcggtctgggcgaccaacgcagcgatgaggccacaggcgaataccagcaccacatcgaccatgttggccaaaggtcccagcggatcgtcgtcgccggccgcaaatcggctagatcgccaccgtcgactcattgtctcgctcctccgcttcgacctcatccagcaactcgtcgtaccaacgccgccgcaaacggccgagcgcaaagccgcccacgccgatcagcagcccgagcacggtggtatcgaaggcgacccgcatcgccacgctgagtatctgcacattgccgtcacccagcgcagccaggcccggaccgagggggatcaacgtgcccatcagcccgagcatcggcccgacgcgggcaaccagatcggcgcgatcaaggcgccgcctggcacgtcgctcgatttcgcccgccgccaacgtgcgccagcgccgaaggccacccagccgctctccagccgcgacgcctacgtcgcagatcaccacggccatgagcccgaacagcgcccaggtcaccggctgcaacagccaaccaaccagcaaatgcagccagccgaacaatcgatcgtcaagcatgttcacctccgttcccgatcggcgccccgcgaccgcgccagacgccgatgccgagcagcgccagaagcatcagcgcggccagccagagatactggctggcacttgcgtccccctccgtggacgcttctgcctggtcaacggcctgctcggctacttcgggctgaatttcactgatcgcgctcggcgccatcgtgtgttgttgcgtttcgcgccgggccgcctccaggcgtgcctgcaacgcttcgcgagcagtgggggtcagctgtggcaacagccactcgatcatcggatgatccggtcgggtatggccactgccgggcagcccgttcgcggccaccagcgtggcgaacgcttcaccgagctcccgtcgagtctgctcgtcggcctgccagaaacctttgtggatggcgaccagcatgatcgccagcatattggtcttcacatgcacattggcgccctgttcgagaaacgaatcgatccccagttcgtagcgatcgtcgaggtagaccgccttgacctcctcccatgcgctgtcctggatgatgtccgggttggtcacctgccagccccagaagtactccagaaactcgctgcccatcgtgcgtgcacccgcgtaatcgtgctgcatcaaggctttaatccacgcaggattgaggaaacgcccgcgtagctcggccagcaacgcctgctgcagcggctccagtcgcacctgggtcggatcgttgtgccagctgacgaaattcgccggtgcctggccggaaagatgttcgaccgccatgctcagaccgccgaggtaatcgaacgcatcgttgttgtccatcagcccgtagaggttgctggaacgaccgagataggtgcggctgacccgcttcaggccgtcctcgaacaccgcttgaaccggctcgccgttgtgccgcataccgtaggcatggcccatccggttgatgtagctgcgcgccagctcgccacgatccagccaactaccggagcgctcaaccaaggtgttgatgccagcgccgtacgcgcccggcgccacaccaaacaggcgcagtgccgacaggcttccggcttgcgcatccgcgacgccaccatccagtcgccgcgcggtatccttcacccaactggcggcgacccgattctgcgagagcggctcgtcgccaccggtcgccagcgcaccgatcggctgcagcgcagcatccagggcgagacgcagggcgggaaaatccctgcgaatggtgttgctggcgccatcgagcgccagcagcacaccacgctcgagcagtgcgagctgatcggcatacaaatcccgaaacaggccggaggtggtgaacatcaggtcgcgccgctcgccgcccttcgcgatcggtacccgcttcagcccttcgacgattccgcgactgttccacaccggctcgacgccgagcagatcgaggccgaacgctaccatggcgccttcgtcccgtacggtgtccgaggcccagaggatgaccgcttcgcgaccgccctccggcatgggtcgctgacgcgcgcggtcggccagttcgcggcctatgccccaaccgatgcgactcggcaacaggctgctgtccagcgcatgaaagttgcggcctgtcggcaacgcctcgggcgtgcggatcggatcgttgcccttgcccggcgcgacgaagcctccatcgagcgcgtgtaccagcgcctgcatttccgcagccggagaatcgaccagtgcctggcgatactcggcctgccctgcgcccatcgacgccatcagggtatcgaccgcctcgtcggaccagggcttgccgaacacatgcagcccgagcggcatgaagcgctcctgaatgttggtcaggtaatggccaacttcgtgaaccagcaggtcatcgtcgacctgctcgaaatcgatgccgcgggcagcaagcggctcggccatggaatcgcgcagctcgggctccagcccggactcgctcaccagccgcttgatctcggcgatggtggcacgccgggccggcccttcggcgctgccggtcccggtctcgaaactctcgatcagctgacgcagcttgagcagatcgtcgtacagcggcgtcgctaccaggggcggggtcaggtggtcgatcatcaccgcgagcccccggcgcttggcctggataccctcgcccaccccatcgacgatatagggatagatgctcggcaaatcggcgacgatctgcatcggataatcttcggtactcagcccggcacgacgccgcggcaggaattcgtaggtggaatgccgccccagatgcaccagcgcatcggccttgaagccatcccgcagccagtgatagaagcccaggtactggtgcggtggtgggaagaccagattcgcgtggagcaattcctcgtcgacctcccagccacgcggcggctgcggaccgataaagacattgcccaggcgcaggccgggaaagatcatccgttccccttgcaccattacctggcccggcccctcaccccaacctcgcagcccctcgatgccagtggccgccagcgcctcgatcagctcatccgcttcgccccaggagactaacccgggctgctcgagcgcccgaccatagaagccttcgagttgctcgagcagccccaacgcgcgctccctggccggatgctggacaccatcgagcaggtgatgcaattcactggcaccatcttgcagggtctgccgagcgatcttcagctgggaagcctgcaaagcccggcgcatctgggcattccagtagccgagcgggccgtgcaccatttcggcctgcaaggctggcggcaaggtacgaaaccagcgcaggtagtcgtcccggtcgagcccgggcaccttggccgccatttcggccagggcatctccctgctcggggaggttcacaccctgctcttgcagcctgttcagcagcgcctcggaagatgccggtagctcacctgtttcgtagccttccgccttgagacgccgcaggatggcgagcagtgactgcggcacgtccagattgtcggcaccgatgttgtgccgcccgggcgggtggttgtaatagatgatggcgacccgcttgttctggttgcccttgcgctgcaaccgatgccagcgatggattcgcgcggcgatcgcctcgacacgggacggtaacggccggctgaagccgaaacgaataccggagttgggatcgagctgagccgattcccaggcagccaggaccatcggctggctgctgccctgcaactctggcatggcgagctggtagtggaccttgtcacgcccaatgccgtcactggaaagctgccaggcgttctcgtcacggtcatccagccgcaaggccttgatcaccggcacatcgaggcgctcgagtatctcggttgcctgttgccgcccttcaccaccaccgagcacgaaatcctgcagcacgaccacagccgtcaggggcagatgcgctccgctttcgagccagctcagcgcttgcaaggtgccaccgccccacccagcgagcaggctgacgcaggcgatgtcccgctgctgcagcgtctggcagagtgcgttgttgagatcggcgtcgccgcggcgatcggcgcggccatgatcgatcaccgcgaccatgctgtcgccgcgccagacgagctcggacgcatcgagcgtgcgtccgtcctggaagaagcgcagcgccggacgcggctcggcaggcatgatccgccttgaaccgtcgctgtcagacaaccagctcagcaggcgcgcaatgttttcgcttccaccggcaatccagtaactgcgcgcctcgatccacccggcctgatccggattggcatcgcccagctcgcggacccagccggccaggtcctcgccgggcttttctgcgccgagacgcattgcctggtcgcgatcgcggaacacccgcttgccatcgatacggctcatcgcaaccagcgcctgatcgctgtgcatgacgtagcgatcgccggagctgtgcttctcgatcagtggtcgcaggcgctccacctctggtccgaagacaccgaccgccaacagcgtgactccaccctgtagccattcggccacgcgggcgtcgtccatctcgctcaactgttccggagtgcgcgcatcgatgatgtcgtccggttggcgctgtttgaaaagggccaccgccgaggcgaattccgccgcgctgtattgggagatgatcgccttgacctgcccggccagggcgcagggcgcgagcagcagcgaaagcgccaagccaacccagcggaaaacgatagacatgcccactccgtctcgagacgcgcgggcggcagaacgaccgcacgacccgagacgggcgcaaggcattctgaggatgtcgcccaccgcgacaattcctggggagtacgggctggtatcgggcttggtcgaaggttcgaccctaccgttgcgggggcagcatcagcttttggcactgatttcccatttaacccgaaccttgatccgggcaccgcgcactccatgagatcagccgcttggcaactgaaggcgcgaaccttacgcggcgcacccggcaagatcaagcgacgaaccacgacctccggcaccttccgggtttcgatgcgacggggtacgtgaagatggctagacttcgggtgagtcagccataccggggcaaccatgaacgacgaaaagcaacccaaaccacttacgtttcggcaaatgctgcaaagcgtcctggccggcgcgctcggggtgcagagcgggaagaaccgagaacgggatttcagtcagggcaaacccagccatttcattgtgttgggtgtcggcttcactgcggcgttcgtgctggtcattctcggcgtggtcaagttggtgctgtatctggccgggctgtgacaacccggcatccgccggtctccattactggtgactcacccagaacacggcggtggcgaccgccagcagaatcaggacgaagatggcggcggcatccgccctgctgtcatttccaccgcgatgggaatgctcggacatggctgctctccttgtttatagaagtaatcgacgctcaggttgcttgcagttaagaccatgccggcgaggcgctcaagaacaaggctttcaaatgcccaaaacgcagcgtttcgttctaaacatattcccaaacatcacttttacgcataaacgctaactggtatcgtgccggccttccctaaaacgggtgcgcggccgtgcgcgcagaaagctgtagacagcctgaataacaggacacttcatgtacgtatacgaccagtacgaccagcacatcatcgaggatcgcgtgcgtcagttccgtgatcagattcgccgctacctggctggtgagctgaccgatgcggaactgctgccccttcgcctgcagaatggcctgtacatccagcgctacgcgccgatgctgcgcatcgccgtgccttacgggctgttgtcgtctactcagattcgcaagctggcggaaatcacccgcaagtacgacaagggctatgcccacatcagtactcggaccaacgtgcaactcaactggcccgaactggaggacgttcctgacatcctcgccgagctcgcgaccgtacagatgcacgccatccagaccagcggcaactgcattcgcaacaccaccaccgaccagttcgccggtgtggccaaggatgaactgatcgaccctcggccctggtgcgagatcattcgccaatggtcgaccttccatcccgagttcgccttcctgccgcgcaagttcaagattgcagtaaacggcgccgcgagcgaccgggccgccatcgaagtacacgacatcggcctcgaagcggtgaagaacgacgcaggcgagctgggctttcgcgtgtcggtgggcggcggcctggggcgcacgcccatcgtcggcagcttcatcaatgaattcctgccctggcagcacctgctgacctacctcgacgccatcctgcgtgtttacaaccgctatggccgtcgcgacaacaagttcaaggcccggatcaagatcctggtcaaagcgcttacgccagaggtgttcgccgaacgcgtcgaagccgagtgggcgcacctgaaggatggcccgaacaccctgaccgaagccgaagtcgagcgcatcggcaagtttttcatcgaccccgactacaggaccctggaagaccagaccgaggcgctcgccgcgctcgacgcggagcaccccggcttcgcccggtggcgcgagcgcaacgtggtggcgcacaaaaaaccgggttatgccgccgtaacgctgtcgttgaagagcaccggcgtggctccaggcgatgtcaccgacaagcagctcgacaccatcgccgatctggcggatcgctacagctttggcgaagtgcgcaattcccacgagcagaacatgattcttgcggatgtcgaacagtcacgtctgttcgagctgtggaacgagcttcgcgagctcggcgttgcaaccccgaacatcggcctgctgaccgacatcatctgctgccccggtggcgacttctgctcgttggccaatgccaagtcgatcccgatcgccgaagccattcagcgccgcttcgatgacatggactatctgttcgacattggcgacatcgacctgaacatctccggctgcatgaatgcgtgcggccatcaccatgtgggccacatcggcatcctcggcgtggacaagaaaggcgccgagttctaccaggtgtcgctcggtggcagctccggccgtaatgccagcctcggccagattctcggcccgtccttcgctcaggacgtaatgccggatgtgatcgaaaagatcattggcgtctacgtggagcaacgtaccgaagatgaacagtttctcgacactttccgccgtatcggtatcgaccccttcaaggagcgcgtctatgcagcgaatcattaaggacgggcaggtcatcgacgagacctggcacctgctgcccaaagatgtgtccctggatagcctgtccaattgcgacgacctgatcgtaccgtttcagttgtggctcgatcatgctcacgcattgaaggcgcgtgacggtggcttgggtatctggctggacgccgacgaagcggtggaagaaattgccgatgaccttgagcattttcaggtgattgcgctcaatttcccgacctttaccgatggccgccattactccagcgcacgcttgctacgcgaacgctatgcctacaagggagaaatccgggcgattggcgatgtgctacgtgatcagctgttctatatgcggcgttgcggcttcgatgccttcgccatccgacctgaccgcgacccctatgatgccttgcagagcctggaagacttcagcgtcacctaccaggccgccgttgaccagccgctgccgctgttccgccggcgacaaggctgagccaggctgtaatgcaaaacccgccactcggcgggttttgcgtcatgaatacatccaaaagttcggatgctcgatcgggacaacctggccctgctgttgccggctaaagacgaccttgattttctctgccagtgctttcatacggaccccgctgcattgaagtgagccttagcttctctcaacggcgcagcggaatgaaatgggcgttgcctatggctgctatagcgcgctggcaataggctgcccttggcatcgtcagtcgagccgaaccaacatccgcccggcttgctgtccgttcagcatttgcgctatggctgcaggcagctctgccagggtgatttctttcactagagcgtccaggttcggcagcttccattgcactgacaagcgatcccacatcgaggctttgaccaccagcgggatctccaccgagtcgacgccaagcaggtttacccctcgcaggatgaagggcagtacgctggcctggaaattcgtgccggcagtcagaccgcaacatgcgacgctcgcgccgcgctgcaatgatttgacgacattgaacaggatgtcgccaccgaccgtatcgacggcgcccgcccattgctcccgcagcaggggcttctcgataccggcctggagggcgctgcgctccaggatctgcttggcgccgagcccggtaaggaaatcagcctggtccggtttgccggtgaccgctgcgacgtggtaaccgagactggccaacaaagcgactgcaatgctgccgacgccgcctgtcgcgccagtaaccagcactggtgcgtcggtcgcttcgaggccagcctgctcgagtttgtccacacagagcgcagcggtcagtccggccgtccccaacgccatggcttcgcgcagggagagcccggcgggacgcttgatcacccaggctgccggcacgcggatgtactggccaaaaccgcccgccgtgttcatacccaggtcataaccggtaacgatgacctcgtcacctgcacagaactccgagacgctcgactcggtaacgacgccggccgcatcaatgcctggtgtgtgcgggaaattgcgcgtcacaccacggttgccactggccgaaagagcatccttgtaattcagcgaagaatagctgacacgaatcagcacctcgccggccggcagctcgtcgatgttgcgctcgacgacctgcgtctcgaatcggccactcgcgttttcacgcgcctgcagcgccagaaagcttcccatcggtacctccgtcattgccagaatcgctgttcgttgagccgcgcccaacctttcatcacgctctgctccagagcgacgctggccgccatgccaaagcgctccggaagactcttcttctcggcgtaatgcagctggtaaaggtccgcatcatgggctcgtgaagccagatactcatcgctggttttcagctcgtcgaccaactgcttgcccaacgcggcgatgcccagccagacctcacccgttgcaacgtcgtcaatggcgacctgttgccgatagcgcgcaacgaagttcttgaacagctcgtgtgtggtctccagatcgtcctggaatttctcccggcctttttcggtgttctcgccaaagaccgtcagggtgcgcttgtattcgccagcggtcagcacctcgacatcgacgtcgtgctttttaagcagacgatggacgttgggcaattgggcaacgacgccgatcgaaccgagaatggcgaagggcgcactaagaatcttctggccgatgcaggccatcatgtatccgccgctcgccgcaaccttgtccacgcagacggtcagaggcaccccggcatcgcggatgcgcaccagctgcgatgccgcaagcccgtaaccatggaccatgccaccaccgctctccaggcgcagcacaacctcgtcctggggcgtagccatggtcagcaccgcagtgatctcgtggcgcaggctatccactgcggacgctttgatgtcaccgtcgaaatcgagcacgaaaacccgcggacgggtttcgggattcttcttcgccagcttggccgccttggcctcgcgtttgcgctgttgcttgagctgctccttgtcgatcatggtttgttcgagacgctcacgcatcgacttatagaaatcgttgagtttgtgaacttccagatggccacccgcttgcttggttcgcccacgccgcagcgacgcaagcgctatcagcaccaccagcacggcggccaccagcgtcacggttttagccagaaagcttgcatagtcagcaagaaactccacaggtcccccttgaatcgatagccgccagtagaaccgttccgattggcgtaagcgctcaagcataccgactgcgcgacaatttgagcagcgcgagccaattcaaacaaacgtatgatttatcgttgacaccccagggcgatccccctaccctcgcgaaaaataggtccggagcgaagcatgggcagcatctacctgatcagacatggtcaggcgtcattcggcgcagaaaattatgatgtcctgtcaccgcttggcattcagcaggctagcgccttgggcgagtacttggatcgcctgggcattcgcttcgaccgctgcatcagcggagacctcaatcggcagcgggacacggcaagcgcgacgttgcaacgcatgggcgcaggcccgcaactaccacaaccagccatagagaccgaccccgccttcaatgaatttcatgccgacgaagtgattcgcgcgcacatggacgatttgctggccgtcgagcccgaggccatgcagatcctcgccaacgcagccagtcaccgcgccgaattccaacgtttgttccaatacgtgatctaccgctgggcgtccggcgagcatgagaagcacggcctggagagctggcagagcttcgtggaccgcgtccaggccggcttgcagcgggtgctcgcccaagcaggcaaaaaggaccatatcgccattttcacctctggcgggaccattaccgcactgcttcaattgatcatcggcgtaccgcctatcaaggcgttcgagctgaactggcagatcgtcaatacctcactcagccgcttgaaattccgcgatcaggacgtggccctcgcctcgttcaatagtcatgtacacctggaactgttgaagaatccggagctcgtcacctatcgataggctccagccaactgcggccgcgggctgcacgtctttccacgagaacaaagggacataccgatgagcaatgtcgacgataccattcagggcatgaaggccaagttcaaccccagggcagcggccggcctggacctggttttccagttcaacatcaccgatgccgaaaactactacctggtcgtgaaggacggcacctgcgatttccataaaggcgaatcggctgacgcgaacgttacgctgattatggacagcgaaaccatgcagggcgtcattagcggtgaaactgacggaatgcaggcgtttatggccggcaagctgcgcgccgaaggcgacatgatgctcgcactgaagctcagcgagctgtttccggcctgaccgcggatatgcaacgaaaaaaaccgaagtctcgcgacttcggtttttttatgcgcttttttaacgaacttggcgcatcaagcaccctgattacacggcaacacccaggccaataacgaccgactttgcttggtcatggtcgccgccgcctttagattacgagcgccggatggtcagtcgtcgtcttgggctcgggctgccaagacctgcttaccaggcatcgatcaaaagaagggacaagcatggcgctaacagatcagaccagccgcatacgcgagggtgaagagctgcccaccgatatcatcgaccaatacctcaaagcccacatcccgggccttgagggcaagccgatcatttcgcaatttccgggcggggcatccaacctgacctatctgctcgaatacccgaagcaggagttcgtgctacgccgcccgccgttcggacacaaagccaagtctgcgcatgacatgggccgggaataccggattctcaatcagctcaacgcaggtttcccctactgcccgaaggcgtatgtgcattgcactgacgaaacgctcatcggcgccgagttttatgtcatggagcgcgtcaacggcatcattctgcgtgaagacatgccgtccgagcttggattcacagcggagcaaaccacggcgctgtgcaagagcttcatcgacaagttcgtcgacctgcataatgtggactacaacgcctgcggccttggtgacctgggcaagccggagggatacgtgcagcggcagatcagcggctggatcgaccgctacgagcgggccatcacggccgatgcgcccggttgggagccggtaaagagctggttgcgcgacaagatgccggccgatcactccaagcccggcatcgtccacaacgactaccgcttcgacaatgtcatcctcagcccgagcaacccgatggaaatcatcggtgtgctggattgggagatgaccaccataggcgacccgctgatggatctgggcaatacgctcgcctattggatcgaagcgaccgatccgccgccgatgcagttgatccgcaagcagccgagcaatgcccccggcatgctgacgcgccaggagttcgtcgactattacgccgagcgcgccggtattcgaatcgacaacttcgacttctactacacctatggcctgttccgtctggccgccatcgtccagcagatctactaccgctatttccacggccaaacccaagacaagcgattctccaaattcgtgcaaatgaacgccctgctcgagcaagcgagcctgcaggtcatcaacaaatcgaagctgtaacacagctcacctagagggaacccgtcatgagcaaaaccaccctgttcgatctcgatggcaagatcgccttcgtctccggcgccagccgcggtatcggtgaggccattgcaaaactcctggcccagcaaggcgcgcacgtcattgtttccagccgcaagatcgaaggctgccaggctgtcgcggatgcgataaccgccgctgggggcaaagcaaccgcggtcgcctgccacatcggagagctggagcagatccaggccgtattcgctcagattcgcgaccaattcggtcggctggacattctggtcaacaacgccgcgaccaatccacagttctgccatattctcgacacagacgtttcggcgttccaaaagaccgtcgatgtgaacatccgcggctatttcttcatgtccgtcgaggctggcaagctgatgcgtgagcatggcggcggcagcatcatcaacgtcgcctccatcaacggcgtgacacctggcaacttccaaggcatctactcggtcaccaaggctgccgtgatcaacatgaccaaggccttcgccaaggaatgcgcaccgcaaggaatccgctgcaacgcgttgttgccgggcttgaccgataccaagtttgcttcggcactggtcaagaacgactcgatccgtgaggaagcgctgcgccatatcccgctaaaacgcgttgccgaccccagcgaaatggccggcgccgtgctgtatctggccagcgacgcatcgagctacaccaccggcttgtccctcaacgtggacggcggctatcttgcctgatcgaacagcgcgccaagaaaaaagggaacccgagggttccctttttttcgtcaagcgtacaaaaacctggggctaccagtccttcatcgcccgctcggcggcgtcgtttgccggttttgccaacagccccgtcggcgccatctcgacggtatagctggcaccgtcggcgatgggtagataactcacgcgccgaggctgcgcctcgagtaacaacgacccacattggcaaccttgcaaccatgcccagaagtccaccccggcctggctacgtcccaacgccacgcttgggcggtgagtccgatcttcttgctcgacggcaaggtagcgcccagagagcctttccagccggtaaccgggcttcagtccaatgagcgacgcaagacctttccagtggagcgcgcgcacgtccaactgccagagatcgccttccagcacgacatagcggatgcggctgccctcctcgactttcacctgataacgctgctgtccgtcggcctgaaaggagagcgacaccaaaggggcaccttgtaccagcggctgataagtcgcgacgtcccaggcgaccaatccgatcagcccggcgattaccagaacggacatgcccagggttccgcgcaaccagcccaacagccagtggccgccagccagcacccgcgcggcgattagagcgatgagcagcgccgacgacgcgacaaccatcgcgagtcccatatattgcatcgatggccttccacagattcgacggggcattatcgatacgggcttccgagccagccagcatcggagaggaacactggggacgagtcgacattctgcgaccgttcgccaacttggactggatgttgtagccaaccattggcgccttgcctggcaaccggcatcatgctgcgcctgccctacgttaccaagagcgacaatatgccgatgcttgaattcgccgtggatccgctggttctggtcgccctgatgatggtcgcttttcttgctggcttcatcgacgcggttgctggcggaggcggtctcttgacgctgccggcgctgcttaccgcagggctgccgccacatctggttctcggcaccaataagctgtgcgcgaccttcggttcggccaccgcgagttataccttctatcgcaggaaactgttcgagccacggcaatggcggtttgcattgctggctactgcgatcggcgcagcgttaggcgcaggcctggcccacctgattccggcacactggcttaatcaaatgctgccggtggtggtgttcgcctgtggcttgtacctgttgtttgggcgcgcacccacggcgcctcgagtcgatcaggcgcccatttcacaatatcggcagtggccacaaggggtgacgctgggattctacgacggcgtagccggtcccggtaccggtgcgttctggacggtcagcacaatgctcctgtatccgctggatctgctcaaagccagcggcgttgcgcgcagcatgaacttcgtcagcaacggcgtcgcactcgccgtgttcatcatcagcgggcaggtcgcctggtcgctggggatcgggatggggatcgccttgatgatcggcgcctatctcggcgctcgcaccgccataacgggaggctcgaagttcatccgtccgatcttcatctccatcgtgctggcgctaagcgtgcgcttagcctggcagcactggttcggggcggcctaaacgccgagccacatagaggtcgatcaggtaacgggcgatggatttcggcgccggcaacgggggcaggtcgtgtatcgagaaccaaccggcgtcctcgatctcttctggctgcatgacgatctccccggaggcatattcggcatggaagcccagcatcagggaatgtggaaacggccagccctgactgcagatgtagcgaggatcgcgaatcgcaacaccaacttcctcatgcacctcgcgccggacgcattgctcgaccgattcaccgggctccacgaatccggccaaggtgctgtacaccccggcagcgaaccgaggagagcgggccagcagcagctcgtcttctcgcgtcaccaggacgatcatgctgggggaaatgcgggggtattggtgaatgccacagcgctcgcactgcatcgccctttcgcgcgggtgctggcgcatcgggccgccacagctgccacagaagcgatgatggctcgcccaggtgcctatctgggccgcgaagccgagcatgcggaaccgatcggtgtcgtcatcctgcagcatgaattgacgcagaccctgccagcttgcgccaggcacctccaccggatgcgccagctccagcagatacaccgaatcgccttcgaagtagcccagaccctgctcgctgagcaacggcaattcgaggcgcttgagccagtccctgggaaacagcacgccgttggcatctaacagaaagccgtgctcacagtgcacgacggcccagccgccgatatcggacggatcgagcagtgccggctgccaacgcaggctcatcaggcggccaccggcaagcccagcgcgcggacgctctcggtcgcgagatccagcacgcttacgcgggaagcgtcacgacgcagtatcgcgccgccgtcgaggtaatattcgaggctggtcaaggcatcggccagggtttcgagcatctgttcagggggcatctgcacgccttccagcatttgcttttggatgaagtcggcacaggcgccgatcagttcggcagcccggtcctgctcgaggaaacgcagcccgccacgcaccgccatcaggctgaaaggcacgttcgccaggtgcagcttctctccgttggactccagataagccgtgatcgcgcgctttgccagcgcgagccccgccgtggcttcgccgatgacgacgatgcaagcctcggtgagctgatggttggcgaatgcctcggcttcgtggcctggctgcacgctctgcggccgtacatctcggcgctcgccccgctccaggcttgcgaccatgctctctacgtagaggaccgcgtcagccaacttcagcagcgcttgcgaatccggcagccgctcggcgctccagcctgagaccaccggaagctgcgcatgcaaggcgctggacgccgaagagagccccaccataccgagggtcttcgccagcttaccgaccaagctgtgcagatgcgcgtaggactcggccggcgcggtctgccgttcgatcagatccaagaggtccttgagactcgccagctcttcgcggatagcggacgacagcgagcgcatcaccgcctgcccggggccggcgagacgctgggattcgtcctctagaagatggtcggtaaagggcagcgagccaagcgaaaaggtttcccgaacctgggtcgccagcggcccactgctttcggccaatgccacaaggtacaggagctccttgagcagcacacgcggcggttcgtaggcatcgctgctgctgagctgacgcagctcgcgatcgagacgggagaacaactgcttgcgtgactgacgcggcaacagctggccatcgagctgagcctccaacgcagcgctacccagccagcacaggcggccgccgggcgtgttcgcgaacaagagatccaaacggctgagcgctcgagccatgagcttgagactcgccgaggttttgtcttcacgaatgaaaccgagcagcccgacctgatacatctgacgcaatcgtcgcgcttcggtcccaagcgctgcaggctctctggccgccgcagccactggcggccgagcgtgatcgaggcggacgctgaagaaaaagctctccggcaacggcgcctgtccgttggccagccgcagggcattgatgggtggcaggagcagttcgggcatctcctgccggctggcatcgacgctttccagatagcgtccgagcacataaagcgcattgctcagcgccgccaaatgagtgtcccgctcctcgccggcaccgaccgggatgtcggtcgccagctgcagaatctcctgcgcaagcaactcgccgccggtcaactcgatgagcttgagcgtaccgcgtacctgcttcaggttctcgacagcctgctgtaacagactgccgttgctccgatcgatgatgaagtgttcgaggctctgctcggcttcttccatggtagcgaatagctcatcgcggaccaggctgagtgaagtagctccggtaaccatggctagcgcgcctcccgcgcaacgttagaataatgacgcatcagtcggcgaagtccggtttctgtttgctcatgtgggcagccatggcgaccttgaggtccgcggactgaagcatcgctgcgttccaggtggcaatgtattcgagaccatcgtcgacccggtggtcacgcatgtagcgaatcatctctttggtgccgcgtatggccactggcgatttggcggcgatatcggcggccaaggcatcgaccgccctcatcaaggccggcaggtcttcgtatgcgcgattgaccagccctatggcctgcgcctcctgcccatcgacggtgcgcccggtataggcgagctcgcgcatcattccgtcaccgataatccgcggcagccgctggagcgtgccgacgtcggcggccatgcccatgtcgatttccttgatggagaattgcgcgtcgaacgtgctgtagcgcatatcgcaggctgcgatcagatcgatcgcaccgccaatgcaatagccctggatcgcagcgatcacgggcttgcggcagttatccaccgcattgaacgatgcttgcagcttgagaatctgtcggcgcaggcgctcagcgttacgaccgacgtcgctgcccacctgactggccgcctgcgccaacagctggagatcgatgccagccgaaaaatgcctgccttcgccggacaggatcaccacccgaacctcgtccgtatcgtcgatccattgaaagatatcgactatctcactccagaacgcggcgttcatggcgttgaccttgtcaggccggttgatcgctacatgggcgatcttgtccttcaactccacacggaaggcttggtattcagtcacgctatcatcctcgacagccgaggcacctcagtgcctgaaaacagttaaacagctccgcggcagggactgctctcaaccgagcaactataacaacagccgagtgaaagtcgatgcgggacgttgtgatgcagcccacgccttgcacatccttggcagaggacggtcacacctcaagtatgcagtcgacggtatagcgcgtgccgttcggatgatcttcgcgctgcagcccgtgcacgtcggcatcgaagccagggaaacgctcggcgaaacgctgggcgaaatccagatagtcgaggatcgatcgcgtctcggcggtgaagcgctcccccggcatgatcagcggaatgcctggcgggtatggcaccagcatgacggcggcgatacggccttcgagggcatcgatgggcactgcttcgacctcacctcgaaccagcttgtcgtaggcatccgccggcttcatcgccagtagcggcaacgcggtatacatgcgtcgcatggccctcgccgtggcgttctcgcggtagcagtcatgcagcgaatcacacagatcccgcagccccatgccaacgtactgactgcctcccgcctgcatgatgctcggcagggcatcgcagagggacaggttgttgtcgtaatgacgcttgaactccagcagttccgtcagcagcgtgctccatttgcccttggtgatgcccatcgagaacagcaccaggatcgaataaagcccggtcttttccacaaccaggccccgctcccataagaatttgctgactaccgcagcagggatgccccgctcgctcaacttgccgccagccgtgagtccgggcgtgaccagggtgaccttgatcggatcgagcagcacataatcgtccgcgacttcgccgaagccatgccaatcggcttccggctcgagcagccaatcggtcgtgaccagctcatccacgccgtccaccgcatgcggctgccaaatgctgaaccaccagtcatcagccgccagatgttgccgaagattggccagcgcacggcgaaagctcagcgcttcgtcgaaggtctcctggatcagcgatcgcccggcgggaccttccatcatcgccgaggcgacatcgagcgatgcgagtatcccgtactgcggggaggtcgagatatgcatcatgaaggcttcgttgaagcgatcacgatccagttgccgctgctgactgtcgagcacgtggatcatcgatgcctgactgaaggccgcaagcaccttgtgcgtcgaatgggtggtgaataccagaggcccctgttcgcgcgtatccatgccatagcgcccgtcatagaactcgtgaaacgcggcgtatgcgtaccatgcctcgtcgaagtgcagcacatcgacgctgttgcccagtgtccgcttgatcaggttggcgttatagcagaggccgtcataggtggagttggtgacgacagcaagcttgacccgcggcaatcgtccgcgcgccagcggattcgcgtcgatcttggcctggatcgactcgggagaaaattcctcgagcgggatcggcccgatgatccccagttcattgcgtgacggggtgaggtagagcggtatcgccccggtcatgatgatcgaatgcaatatcgacttgtggcagttgcggtctaccagcaccagatcgtcccgcgccaccatcgaatgccagacgatcttgttcgccgtcgaggtgccattgatcacgaagaacgtgtggtccgcaccgaagttgcgcgccgcacgcgcctcggctgccgccagcgggccggtatgatcgagtagcgagccgagctcaggtaccgagaccgacagatcggaacgcagcgtgttttcgccgaaaaactgatgaaaggcttgcccgaccgggcttttgcgaaaggcgacaccgccaccgtggcctggcgtatgccaggaatagttggagtcaccggtgtgctgcaccagcgcgcggaaaaacggcggcagcaagccgtccagataggcgcgcgcagcccgcgctacttgccgcgcaagaaagggaacggtgtcttcgaacagatagagcaaaccgcgcagctcgttcagatccgccatcgcctcggcgggcgcgttctcgatggtgatctgctcacccagggcaaagatcggtaactggggcgcgcgacgtcgagcgacacgaatcaggccgacgacgtcctgcagcagccgttgattttccccggccccctcggccgcgaccagaatacaggccaacccatgatgcgtggacgcgacgatgcggccttcggcagcgctgcctgtcgggaggatatgaaagccgtcccgttcgagctccgcagcgatttcacggactcgctcgccagcgacggtatcggccttgatgtcgcggtgaacgatgaggatgggaaacttgaggtctttgtacatgggcggttcctggaggcattcccctccagcgtagaagctccgcccccaagctccaagcgcgaaatgcgcgcgtcggcgagattatcgccagcagccggtcaagccggcagggcttgagcctcgatatcggccggctgctccaactgtacccagagcggagccgcacccgcggccttctcgatagcctgcatgcgcgccgcgtgcgcagcgagctcttcggcatcggcacgaatgaccagggtgctgggacggtcagccggcaaccggcggatcggcgtcgcctgctggcgaccaccattctcggagtcggctccctcaccggccagggacagattggtctgcccgccggtcatggtcaggtagacatcggcgaggatctcggcgtcgagcagagcgccgtgcagatcgcggcccgagttatccacgccgtaacgcttacacagtgcgtcgaggctgttgcgctgaccaggatggcgctcgcgcgccatcaacagggtatcgaggatgctgcaatgctcgctcagctcggcccgatcctgctggccgagcaaggcgaattcattattgatgaagccaacgtcgaacgccgcgttatgaatgatcagctgcgcgcccttgatgaattcgaagaactcgtcggcgacgtccttgaatcgcggcttgtcggtcagaaaatcgttggtgatgccgtggacggcgatggcgccctcgtcgacctcacgatccggctgcagatagacgtgatagtgccggccggtcaggcgtcgcccgatgacttcgacacagccgatctcgatgatccggtggccatcggtcaccggcatgccagtggtttcggtatccagcactacgctacgcatatttcatatcactcaagcggtttgtcgtttggcctgtactacgccgcgattggccaggatatcggcacgttcgtttccgggatgcccggtatggccacgcacccactgccagctcacctgatggcgattgacctgctcgtcgagctggcgccacaggtcagcgttcttcaccggctgcttggcggctgtcttccagccgcgcttcttccagttaggcatccagtcgttgatgccctgcatgacgtactgggagtcggtgaccagcctgacctggcagggcctcttcaactcttccaatgcgcggatcgccgccatcaactccatccggttgttggtcgtctcagcttcgccgccccacagctcgcgctccacgcccttgtagaccagaagcgcaccccagccgccggggccgggattgcccttgcaggcaccatcggtatagatctcgactgtttcatcactcatgaacgattatctgcctgctactgttcggcatcgcggcgactgaccttggctaccggcatcggcagcagttgccccatccgttcacggcggctttgccgcagcgggcgcaggcctaccatcaactttcgcgccaccagcaaatagaaaccgccggtcggtagtttcatctgctcgccagcgatttccagcggcgacaatcgcgcctgccactggcccgaagaaagcggcggacaatagcacccgaaccggcgtttctccagcgcgaatccgagcaggttcaaccaatcccccacgcgcgtgggacggatgcaccgtgcttggcgcaacgctcttcgggaaagcaagcgtgatgctccccagacgctccagggattgactccgacaatcagcagatgcccgcccggcctgacgctacgggctgcttcgcgcaacagggcgtggggcgagagactgaagtcgaggccgtgctgaaccaccacgacgtcggcggcgtgttcgccgatcggccatgactgctcctcacacacgatctcgacaccagcgagcggtggccccagccgcacactgcgcttgatcttctgcggctcgatcgcggcattggcgaaaggaccgtaatgcaccagataactgccgaaacaacgcgacaactcctggccgatcacgcgtcgctcctgatcgagcaattgttggccggtcggactatcgaaccaggcactggtttcgttcatcagcgtcagccaacgttcatccggcttggtacaagatccactcatggctagcctccgctcatcggttcgccgctccgaccggagccatcggccggttcaactttaaccatcctggctgctaggatgcgcttttacagttgacttggcgaccggtgcccatgttgaagatcgacgctctccccgcctttaccgacaactacatatggctgctccaggaccctgaacagcgcacttgcgtggcagtggatccgggtgatgcgggcccggttcaggcatggctggatgcccaccacgattggcgcctgaccgacatcctcattacccatcaccaccatgatcacgtcggcggcgtgctgcaactcaaggaacggcacggcgcgaacgtccatggcccagctgcggaaaccatcccaggcagggacaacgcgctgaccgatggccagagcatcgaggtgctcggccaccggttcgaggtgatcgaagtgcccgggcataccagcggccacatcgcctactaccacgacgatccggaagagccgctgctcttgagcggcgacacgctgttcgcagccggttgcgggcgtctcttcgaagggaccgccgcgcagatgttcagctcactgcagcggttggcagccttgccggcgaacacacgcatctattgcacgcacgaatacacactgagcaacctgcgctttgcccaggcagtggagccggacaacccggagatcggcgaacgcctcgaacaggtcatccgcctgcgtgacgcgaagcgcattaccctgccttccgagctgcgcatcgagcacgccaccaaccccttcttgcgtagcgctgaaggcgcggtagcggcagcggccagccgccatgcagggcgccagctagacacgcccgaaaacgtgttcgcagcactgcgcgcatggaaagacagcttctgacgaaggtcgacccgtcttcaaaaaccgcagcgccgggttgacccaccagaacggcattcctacactccctcgaattttgcgccagggaccccttcagccaatgccgtctgactcctcgaactgccctcatccggacgccttggcagcctccggccgggccctggcgctggcgatctgtctcgccatcacgggctgccaaagcaccgctccgcgcacaccggcaggcagcgaggccaaggcgcctacggtgctgccacaagaaaccctgtggctcaccgagaaagacccgatcagcccggtctattccgatgtctgggatcgcatcaggcacggttttcagcttcaggaatatctcgacagcaaccctcgcatcgaacaacagcgactgctcttttccagccggcccaagtcgatagaaatcgccagcgagcgtggcagcccctatatccactacatcgtcgagcaactggaagagcgcaacatgccgctcgagctggcgctgctaccgatcatcgaaagcgcctacaacccctttgcctattcgcccgcccaagccgtcgggctatggcagttcataccctcgaccgggcggcatttcaatctgcaacagaccagttggtacgacggcagacgcgatatcaccgcctccaccaccgctgcgctgcgctacctgagctatctgcatggtctgttcaacgatgactggctgttggccctggcggcctacaatgccggcgaagggaccgtcagccgggccatcgagcgcaatcagcgactaggcctgcccaccgactactggaacctgtccctgcccagcgagacgcgcgactacgtgcccaagctcctcgcgctttcgcagatggtgcagaaccccgaagcttatggcctcgcactggacccgattgccaacgagccctacttcgaagtcgtagcgctcaagcagcggatggatctggcccgagccgcgcagatggccgatctcgacgaagacgagatgtaccagctgaacccggcattcactcgccgcgtcacgctggacggcccgcagcatctgttggtaccgagcgccaaagccgagatgttcgcggccaacctggcgctgatgaaaccgcaggatctggtcgactggcagcaatacaaggtccgcccaggcgatacccttggcgtgatcgccaacaggcacgggctttcggtcaacatcatccgggacatcaatcgccttcgaagcgaccagttgcagatcgggcaggtgctcagcattccgcactcggcgggttcgaatccttcacgcgagctgctgcatgcggttgccagaagccagccggcaccccgcagctatcgagtgcgtccgggtgacagtctctgggatatcgccaaagcacagaaggtatccgtccgcgacctgcaacgctggaacaacctgtccggcagttctttgaaggtgggccaggcgctgtttctgcaaagcgccggcagcaatcggcaggccaaaccggcaccgacctattacaaggtcaagaaaggtgactcgctgtaccagatcgccagacgcttcaacgtccagattcacaacctgaagacctggaaccctcgcgacagcgcgatgctcaagcccggccaaaccctcacgttatacatcgcccgctgaagcggctcgctcaatcgcgccggccgcttgcgagggtatcgaggcagcgccccgccagttgggtaaagcgctgaaaagcgacgaactgctcatgcttcagggcccggccggatatgcggttgtcggcatacagcacgccgatctcccgcgtcccggccatcagcggcgcgatgaaaaacatgcctttgcccaactgctggcgaagcggcagcgtcaccagttcgtcgaggttgtagctcgccggaacgcccatccacagcgcctgccgttggcgcagtacataactgaatatatgtgcctggccgtctggatcgaccggcagaacgaagttttccagccagggttcggtctgctcgccggcgacacgtttagcgcgaaatgaacgctgctgatctgcaagcacggtcagcatgacgcgctcgagaccagccccctgatggaggcctttgagcatcgcgtcgagaatcaggccgacgtcgccacggctgacggccatcatgccgaggtcctgcatcgcctgctgcatcactagcagatcgggctgcagctgcctcgcctgacgctgcgcctgttgcaactcgacttgttcggggtcggttgacggaatgagcttgcccagccggctggcgccgaacgtcgtcgccacgttgaccgcctcgtccgcactggccagcacctgctgcatggcatcggtttcggagataccgctgaactcggccaactccttgaccaagctatccatctgcgcgcaaccccacccatcgagcgccgcagcgccgatgcgcacaccgagattgacagcgcgtacggcaggatcgcgcagattgctcgagccgtgagcgaagctggcgagctcgccgatgttccagctcttgatcaaaccgagattgagttggcggaaactggtgccgagcacgtcctccaccgccttgtcgtgatcggcaccgcttgccgccagcgcctcgcccagttcatcggcctgctcgccgccacagccccagaaggcgagttcacccacctcgtggagcagcgccgcgatgaagacttcctcttcgtgtcgagtcagtacatagccggcgatgttgcgcgcctgcactgccgcatggaacgagcgcgccaacaactcctgcagctgctgacgcggcgctcgatcgagcagcccgtcgatcagactgaccgacaagctgatcaggcgcacgttatcgaagccgatcatgacgatggcgcgggaaatggtcttgatggtttcctgcgatgggttgtaatagctgctgttgccgacccgaagcaccttggaggtcaacgcggcgtcgcgcagcagaacatcggccaactgttgaacggacgcatgttcctgttccgtaagacgttgcaagtcctgtacgacggctgccagcgctggcaactcggattggttcaggcggtcaatccacgcctgcaggccgtagcaacgatcactcaaattctgcgacctcagacgatggtcaagcggcggaatggaaaggcagtttgcctcagatagccggcctttttccagcggatacaagctgttactgtaccccgccgaaaagacctaaagcgccatggattggattcacaatttgctgcgacccatcctgacagtgttgacctgcctgagcttgagcgctccgtctttcgcgaccatcagcgagagccacggttatgcgcagttcggcgccctcaagtatgcgcaggatttcacccacttcgactgggtgaatcccgatgcgcccaagggtggtcgcgtgcaattaatggcctctggaacattcgacacgctcaacccctacactttcaagggcaccagcccgacagcgaccccggggtttctgcaatacggcatcagtgagctcaacgagccgctgatggtcggtaccggcgtctacgacccgtcaggcgacgaaccggcttcggcctacggcctcattgccgagagcatcgaatacaacgaagaccagagttgggtcgtgttcaacctgcgcgattcggctcgcttccacgatggccatccgatcaccgcctatgacgtggccttctcataccgtctgctggtcaaagagggccacccacgctaccgcaccgatctgaaaggcgtcgagcgggtcgacatcctcaaccgccaccggattcgtttcgtcttcgacaaacccggccagccattgctgatcatgcgcctgggtgaactgccggtcctgccacaacattactggaaagaccgcgattttcgtgcgacgaccttcgagccgccgcttggcagcggtccgtaccgcatcagcgaggttcaaccgggccgtcggctgaccttcgagcgggtcaagaactggtggggtgcggatctcgcagtcaaccggggcaagtacaacttcaatcgtgtcgaagtcgagttctaccgcgacacgaccgttgccttcgaagccttcaaggtcggtgaattcgacttttacatagagcaccaggcaaagaactgggccaatggctatcaattccccgcagtgctgcgcggcgatgtgatccgtgccgaaataccccaccagattcccacccagacgcaggcgctgttcatgaacgcacggcgcccgagcttcgccgacaagcgtgttcgtcaggcgctggggatgctgttcgatttccaatggaccaaccgcgcgctgttctacggcgcctaccagcgcagcgaaagctactaccccaacagcgatttcgccgctacaggcacgcccgaaggaggcgaatggctgctgctatcgccgtttcgcgagcaattgccggctgagctgttcagtgagccgttccagctaccgaagacgaatggacgcggcatcccgcgccgcaccttgcgcaaggcgctggagttgttcgagcaagccggttggaagctgaaatcggacggccttcgcgacaagagcggccggccctttcagttcgagattctgctggtcaatccaggtctcgagcgcatcctgcaaccctatgcggagagtctcgcccgggtgggcattcaggcccgcctgcgcaccgtcgacggcgcccagtacaagcaacgcctcgatcggtacgattacgacatgatcctgacgacgctgacccagagcctgagcccggggttggagcaatggctgtacttccactcaagccaggtcagcaccaagggcggccgcaactacgcaggcatcgccaatccgatcgtcgaccagctgctggaaaaactgcttgctgccagcacacgcgaagagcagattgccgcagcacgcgccatcgaccgcgtattgctctggaaccactacaccattcccaactggtacatcggttaccaccgtctggcgtatcgcaatcggttcgcccacttgacgaccccgccttatacgttggggttgcgcgcctggtggttgaaggatttggagaaaactcaatgacagtacccgcacgactgccgctcctgcacgccgctgccttcgtcgtcctgcttgtctcgggcacggtccacgcagcggcgcaacacgcactgacgctatatgacgagaaaccgaagtactcggcggacttcacccatttcgactatgccaatccggatgccccgaagggcggaaccttgcgtgaggccggcttcggcagcttcgattcgctcaatccgttcatcaacaagggcgtcgccgccgacgatgtcggcctcatctatgacacgttgacggcccagagcctcgacgagcccttcacggtttacggccttctggccgaacgcatcgagaagggccccaacaatcagtgggttcgcttctacctgcgccccgaggcacgctttcatgatggcgaaccggtcaaagccgaagatgtcgtcttcacattcgaaaccttgctggcgaaaggcgccccgcactatcggggctactacgccgatgtcgaaaaggcggtcatcgaggggccgcgccaggtgcgcttcgacttcaagcacgccggcaaccgggagctgccactgattctgggtcaacttccggtactgccaaagcactggtgggccgaccgcgatttcagcgcgggcagcatggagccgccgctgggcagcggcccgtatcgcatcgaacgggtcgagcccggccgcaccatccagtattcccgagtcgaggattactggggtaaggaccttccggtcaaccggggcttctacaatttcaaccgcatacgtttcgactactaccgcgacaacaacgtggcactgcaagcgttcaaggcggggcagttcgactactggctggaaaccagcgcgaagaactgggccagcgcctacgacatcgatgcggtcaaggacgggcgaatcatcaaggaggaaatccccaacctgaatccgcaaggcatgcaggggttcgtcttcaatacccgcaagaaacacttgcaggatcgaagggtgcgggaagccctggcactgctgttcgatttcgaatggaccaatcgccagctgttcaacggtgcctacacccgcaccgccagttacttcgacaattccgaactggccgcctccggcctgccaagcaaggacgaactgaagctgctcgaaccactgcgtggtcagatctccgacgaagtgttcgaaaagccattcaagctgccccacaccaacgccgacggcaagattcgcgagcagcagcgcagagcgtatgaactgctcaccgaagcgggatggaaaatcgaaaacgatcgcatggtcgacgccgacggcaagccggtgaagttcgagtttctcctcgtccaggccgatttcgaacgcgtgctgctgccctacaagcgcaaccttgccggcctgggcatcgatctggaaatccgccgagtcgacgtctcgcagtacatcaaccggcttcgctcgcgcgactacgacatgatcgtcagcgggttcggccagtccaattcgccgggcaacgagcagcgcgaatactggcattcagcgagcgccgacaaccccggaagccgaaatttcatcggccttaaggaccccgccatcgatacgctggttgaaaaactcatcgctgccgattcgcgtgaagagctgatcacccgcacccgcgccctggacagggtgctgctctggggccattacgtcattccgaactggcacatcaagacctggcgtgtcgcgtactggaatcacctggcgcatccgcagaccacccccgcgtacgatatcggcctcatgacctggtggaagaagcccgatgtgaaaaggcccacgccagcgccggctgccgatgagccagacgcacctgccgcccccgagaacggtacttcggaggcgcagcgctaaatatgctcgcttatattctccgccgcctgctgctgatcatcccgacactgttcggcatcctgctgatcaacttcatcatcatccaggctgcgcccggcgggccggtcgagcaggcaatcgccaagcttgaaggtttcgacggcggggccaccagccgcatcgccggcggcggctcggaagtcgccaccggcagcaacagctaccgaggcgcgcaaggcctcgacccggacctgatcgccgaaatcgaacggctgtacggctttgacaagccggcacccgagcgcttctggatcatgctcagcaactacctgcgcctggatttcggcgagagcttcttccgcgatgcctcggtcaccgacctcatcatggaaaagatgccggtatccatctcgctgggattgtggagcacgctgatcatgtacctggcctcgattccgctgggcatcgccaaggccaaccgccatggcagcgcgttcgacgtctggaccagttcggccatcatcgtcggctatgcgataccggcgtttctcttcgccatcctgcttatcgtgctgttcgccggcggcagctactggaactggttcccgctgcgcgggctgacctccgcgaacttcgacgagctgacgctgggcgggaagataatcgactatttctggcatctggcattaccgatcaccgcactggtgatcggtaacttcgcgaccctgacgctgttgaccaagaacagttttctcgacgagatcagcaagcagtacgtgatcacggcgcgcgcaaaagggttgagcaagaatcgtgtgctctacggccacgtatttcgtaacgccatgctgatcatcatcgccggctttccgtcggcattcatcgggatgttctttaccggctcactggtcatcgaggtgatcttctcgctggacggcctcggcctgctcagcttcgaggcagccgtcaaccgtgattatccggtcgtgttcggcacgctcttcctgttcacgctgcttggcctggtggtcaagctgatcggcgacctgacctataccctcgtcgatccgcgcatcgatttcgaaagcagggaggcctgagatgctgtcgccgctgaatcagcgccgcttcgccctgttcaaagcccacaagcgcggctggtggtcgctgtggatctttcttacgttgttcatcctcagcctgggcgcggagctgatcgcgaacgacaagccgatcgtggtgcgcttcgatgggggttggtacttcccggtgttcaagcgttatccggagaccgtgttcggcggagagttcccgctccaggcagactacaagggcccctatatccaggagctgatcaaaaaaaaggacggctggatgatctggccgccgattccctttcatcattcgagcatcaactacgacctgcaggtgccggcgcccgctccaccgtccttgaccaactggctgggcaccgatgatcagggccgggatgtactcgcgcgaatcatttacggctttcgcatctccgtactgttcgcgctgacgctcaccctgatcagctccgttatcggcgtcattgccggtgcgctgcagggcttctacggcggctgggtcgacctcgtgggtcagcgggtgctggagatctggtcggggctacccgtgctctacctgctcatcattcttgccagcttcgttcagcccaatttctggtggttgctcggcatcatgctgctgttttcctggatgagccttgtcgatgtggtgcgcgccgagtttctgcgcggtcgcaacctcgagtacgtacgggcggcgcgcgcgctgggcatgcgcaacggcgcgatcatgttccgccatattctgcccaacgcgatggtttcgaccatgaccttcataccgttcatcctcaccggggcgatcggtacgctgaccgcgctggattttcttggcttcggtttgccgcccggcgcgccctcgctgggcgagctggtggcgcaaggcaagtcgaacctgcaggcaccatggctgggcatcagcgcctttatggttctggccatcatgctgactctgctggtgttcatcggcgaggctgctcgcgatgccttcgacccaaggaaatagcatggctgagaacctgatagaagtgcgcgatctggccgtcgagttcgttaacggcgggcaggccaagcgagtcgtcgagggggtgagcttcgatatccgcaaaggcgagaccctggcgctggtcggggaaagcggctccggcaaatcggtcacggctcactcgatcctgcgcctactgccctacccgctcgcgcaacatccggctggagagatcatctacgccggcgaggacctgctcaaggcgtccgagaagcgcatgcgcagcatacggggcgaccggatcgcgatggtgttccaggagcccatgacttcgctcaacccgctgcatacgatcggcaagcagatcaacgaagtgctgcagatccacaaggggctcaacggcaaagcggccacggcacgtacgctggagttgctcgagctggtcagaatacccgagcccgtcaagcgcattcgcgcctatccccatgaactctcgggcggccagcgccagcgcgtggtgatcgccatggcgctggccaacgaaccggaactgctcatcgccgacgagccgaccaccgcgctcgacgtcacggtacagctgaagatcctcgagctgctcaaagaattgcaggcacgcctgggcatggccctgctgctgatcagccacgacctgaacctcgttcgccgaattgcgcatcatgtatgtgtcatgcagagcggtcgcgtcgtcgaacaagcaccttgcaaggaattgttccgagctccgcagcatccgtacacccgggagctgctcgcagccgaacctgacggtcggccggtagcggcggagccagcgtcgccaacgctgctcgaagtgaaggatctgcgggtctggtttccgatcaagaaagggctgttcaggcataccgtcgatcacatcaaggcggtcgatggcgttaccttcgaactgccgaaaggtcagacgctgggcatagtcggcgaaagcggatcgggtaaatcgacactggggttggcgattctgcggctgttatcgagcagtggcgagattcgctttcgtgaccaggccttggagaacatgtcgcagcgggcggtacgtccgctacgacgccagatgcaggtggtcttccaggacccctttggcagcctcagccccaggatgtcggtcggtcagatcgtcggcgaggggctcagcatccatgggatgggtacggccgaagagcaagcgcaggccatcatcgatgcgctggtcgaggtaggactcgaccctgaaagccgccaccgttacccgcacgagttttccggtgggcaacgccaacggattgccatcgccagagcgctggctctcaagccggacctgatcctgcttgatgaaccaacctcggcactggatcgaaccgtacagcggcaagtggtggagctactacgctcgctacaggccaagtacaacctgacctacctgttcatcagccatgacctggcggtggtccgggcactgagccaccagatgatggtgatcaagcaaggcaaggtcgtagaacaagggatggcggagactatcttcgccgccccgcaacatccgtacacacagcagttgctggaatcggcctttatggtcccggcaactgatgaacaaccagaagagggacaagcacatgggttttcttaccggtaagcgcgtattgatcgtcggcgtcgccagcaaactgtcgatcgcctccggcatcgccgcggccatgcaccgtgagggcgccgaactggctttcacctatcagaacgagaagctcaagggccgcgtcgaagagttcgcggcaagctggggatcgggcccggagctgtgctttccgtgcgacgtagccagcgacgatgaaattggcaaggtattcgaagagctgggcaagaaatgggacggcctggacggtatcgtccactcggtgggattcgccccgggcgaccagctggacggcgacttcactgacgtcaccacgcgtgaaggcttccgtatcgcccatgacatcagcgcctacagcctggttgcgctggcgaaggccggccggccgatgatgaaaggccgtaacggcagcatcctgacgctttcttacctcggtgccgagcgcaccatgccgaactacaacgtgatgggcatggccaaagccagcctcgaggccggtgttcgctacctggcaggcagccttggcccagaaggcacgcgtgtcaacgctgtgtccgccggtccaatccgcactttggccgcctctggaatcaagagcttccgcaaaatgctggcggccaacgaaaagcagaccccgctgcgccgcaatgtcaccatcgaagaagtcggcaatgccggcgcgtttctctgctcagacctggcatcgggtatcagcggtgagattctttatgtcgacggcggcttcaacaccaccgccatgggcgcgatggaagactgatctggcagtaacaaaaaacccgcatcgagatgcgggttttttgtgccagctatcggctaatcaatacgtttcgatcttcgcctcggcgtgcagcatctccctgtaggcagcaaagtcctgctgaccactgcgcgacgccaggaaccgacggtagttctgcttatcttcagccgagagttcggttgtgggctcactaaccccactcaggcgaatcactacgtagtcaccatcagcgagacggacactgccatatgtgggcttgtcgttcgaagccggcttcggcatccgaaacacttgctgcagcactacgggctcgacaccttcctgattgcgcgaagcggcttcgaccgactgccattgcttatcgacctgcccgccatcgcggagcgtactgatcagctgctcgcccgcttctttcgcctgatcagcggctttgctgctctgcaactgagcgacgatgtcgcttttcaccgcatcgaacgccagcacttcgggctgtagatgttcttttgcccgcaccacgacgaccgtatcagggtccagctcgatgacactgctattggcaccatcgatcagcacttcatcgctaaacgctgcctggatgacctgcctgttggccgcaacgcctgcaccgccctcgcgaccgaaaggctcgctggtctgaacggccagccccagctcctgggccggctgggcaaggtcggatgattcgaacgccgtgtcctccagctgtttgctcgcctcgacaaagcgctgttccacctgctgcgccttgagctcacgcaccaactccggcttcatgctctcgagcgacgggacttcgggcgattgcacgtccaacagcttgatgaggtgccagccgaactcggaccgtaccggtgcagatacctggcctttgtcgagcgcatacaaggccttctcgaacgcggggtcatagacaccaggcccggcaaatccgagatcgcctccttctttggccgagcccggatcctcggagacttccttggccagcgctgcgaaatcctcgcccgcagccaatcgcttggcgacctgctcgatttttgccttggcgtcggcatcgttggcgtcgctggcctcgatcagaatatgcgcggcacggcgctgctctgccaggttggcgatgcgctgcttgtagaggtcctggatcgcctcatccgacacctcgacctgatcgaagaacgactccttgttcagctcgacgtactcgagaacaacctgctccggtgagcgaaaacgatcggtgttctgctcgtagaattcgcgcgcctcgtcatcgcttacctctacagcggtcgtgttcgcaggcacggttatcgtcgcgaagtcgcgggtttgctgttccagacgagcgaacgcctcgatctgcttatcggtgacgaaaccagaaccggaaatgcccgcacgcagctgcccaatcagcatctcctgctttagcaactgacgaaactggagcctggtgtaacccatctgctggatgacctgatcgaaccgtgccgcattgaacgtgccgtctacggtgaattccggcgtctgcagaatcagttgatcgagcgccgcttcagagaacgcgaaatcggcatctcgtgcgccctgcaacaacaatgtgcggtcgatcagtgcgcgcagggatgactcacgcaccagcttgtcgtccagcagcgaggggtcgaagtcaccgcccagctgctgagccagctgccgacgttgcatgttcattgcctggttgagctcgttcagcgagatgtcctcgccattgacctcggccgcgtttcgactgttgctcgccgcgttgaagatggcatcgaagcctgtcaacgccagcagcatgacgatgatgccgatgatggttttggcaatccagccttgtgaattgtccctgatgttctgaagcatgcgtcccccaggagtcagctgcgcaatgatcactgcagcacgggtggaaaccggataaaagaaaggcgcatccagggatgcgccttctcggagcttttggagcggtcgggccttatcccccaagccctaacgcgacaggtagtcctgttcgaacacccgctccaagccagggccagcgctaactgacaactggccggatcgaaaacgcttagttaacagcgtctttcagagccttgccagctttgaaacccgggatcttggccgcagcgatgttgatcggcttgccagtctgcgggttacggccggtgcgagcagcgcgttccttgacagcgaaagtaccgaaaccaaccagcaccacggaatcaccagccttcagagcgccagtgacggattcgatcactgcatccagcgcgcggccagcaacagctttcgggatatcagcagatgcagcgatggcatcgatcagttccgacttgttcactctaagtccccttatttctgttgagtcgtactttaattttttgggtgtaagcaaagcggtgctgaaatagcagcaacacagagggccggcttatagcaagcccatcgaaaatgtgtcaacaaagcctttcagactaatgcgtgctgattcgctccttggaatcagtctcgcgcttgtcgtcctttgcaacaatatcgggagccgcatcgggcaagggctccggcgcgtattgcagcgcaatttggaggacttcgtcaatccacttcaccggtttaatctgcaggtcctgcttaatattctcaggaatctccttcagatcacgttggttttcttcgggaatgatcaccgtcttgatccccccgcgatgcgccgccagtaacttctctttcaggccgccaatggccaatacctgaccacgcagggttatctccccggtcatcgccacctcggcgcgcaccggaatttgcgtcagcgccgagacgagcgccgtacacatcccaatgcccgcgctcgggccgtccttgggtgtcgcaccctccggcacgtgaatatggatgtcctgcctctcatggaagtccaccgggacacccagactcttggcacggctacggacgaccgtaagcgccgcagtgatcgactcacccatgacatcgcccaacgaaccggtcttggtcaggcgtcctttgccgggaaccactgccgcctcgatggtcaggagttcgccaccaacctgggtccaggccaaaccggttacctggcccacttggtcctgttgttccgccagcccgtagcggaacttgcgtacgcccaggaagtgctcgagcgaatcggcggtgaccttcacctcgaagctcttttccgcggcatgctccttgaccactttccggcaaaccttcgcgatctgccgttccaggctgcgaacgcccgcttcacgggtgtagtaacggatgatgtcgcggatcgcttcttcgtcgaacagcagctcggtctttttgagtccgttggccttgatctgcttgggcaccaggtagcgaatcgcaatgttgatcttctcgtcctcggtgtagccgggcagacggatgatctccatgcggtcgagcaacggggccgggatgttcatcgagttggcagtacagaggaacatcacgtccgacaggtcatagtcgacttcgaggtaatggtcgttgaaattgtggttctgctcgggatcgagcacttccagcaatgccgacgccggatcgccacgcatgtcattgcccatcttgtcgatctcgtcgagcaggaataaagggttacgtacacccaccttgctcatcttctgaatcaaacgacccggcatcgagccgatgtaggtgcgtcgatggccgcgaatctcggcttcgtcccgcacgccacccagcgccatccgaacgaacttgcggttggtcgagcgcgcgatggattccgccagcgacgttttgcccacacccggcgggccaaccaggcacaagaccgggcccttgagcttcttcacgcgtttctggaccgcgaggtattccaggatgcggtctttcacttcgtccaggccgtagtgatcggcgtctagcacctcttcagccttggccagatccaggcgcaccttgctggcggccttccagggcacatttaccagccaatcgatataagtccgcacgacggtagcttccgccgacatcggtgacatctgcttgagcttgttcagctcggctatcgctttggcgtgcgcatccttgctcaagccggcgttctcgatgcgctttttcagctcatcgacttcgttgtggccttcgtcgatatcgccgagctctttctggatggccttcatctgctcattcagatagtactcacgctggctgcgctccatctgcttcttcacgcggccacgaatgcgcttttccacctgcagtagatcgatttcggcgtccagcaaagcgagcacgtgttcgacccgagcgggcaagtcgatgatctcgaggatcgcctgcttctgttcgatcttgagcgccatatgcgcagccatggtatctaccaggcgcgcaggctcgtcgatgctggcaagcgacgagagcacttcggaaggaaccttcttgcccagctggacatattgctcgaactggctcagcaagctgcgggtcaggacctccgactcgcgctcctcgatgtccgactcctcgatcagcgagacttgcgcgcggcaatggtcctccacctcgaagaagtgatcgatgatgccccgctgctcgccctcaacgagcaccttgacggtgccatccggcaatttgagcaactgcagcacggtcgcgaccgttccaacacgatacaaggcctcttcagacggatcgtcgtcagccgggttcttctgggccaggagcagtatctgcttgtcaccagccatcgccgattcaagggcctcgatggacttctcacggccaacgaacagcggaattaccatgtgcgggtaaaccacgacatcgcgcagcggcaaaaggggcaattcgatggttgtcttcataaattcagctctacgacggccatacggcggtaaacgggaacaccctggcaatcaagatgagggcacgcaacgtaaaaaacaaggattcagcggaaaagcaaaggggcccggaggccccttgttcttctacgcgtctggcgcagccttcgcaggcggctcgctattttcgtatatcagcagcggctgagacgttccttcgataacgctctcatcgatgaccaccttgctgacatccttctgggaagggatctcatacatggtatccaacagaacaccctcgaggatcgaacgcaggccacgcgctccggtcttgcgctccagtgcacgagtggccactgctttcagtgcatcggtacggaactccagatccacaccttccagctcgaacagcttggcatactgcttggtcagcgcgttcttgggctccgtcagaatctggatcaacgcagcctcgtccagctcgtccagcgtggcgatgactggcaatcgcccgacgaactctggaatcagaccgaacttgaccaggtcgtccggctcgactgcacggagcgactcaccaatcttcttgccgggatcctgactccggacctcggcattgaagccgataccgcccttggccgagcgcccctgtatcaccttctcaagaccggcaaacgcaccgccgcatatgaagaggatatttcgcgtgtcgacctgcaggaattcctgctgaggatgctttcgcccaccctgcgggggcaccgaagcaaccgtaccttcgatgagcttgagcagtgcctgctgcacgccctcccccgatacgtctcgggtgatcgatgggttatcggacttgcgcgaaatcttgtcgatctcgtcgatgtagacgatacccatctgggccttttcgacatcgtaatcgcacttctgcaacagcttctggatgatgttctcgacatcttcgcctacgtaaccagcttcggtaagcgtggtcgcgtctgcgatggtaaagggcacgttcagcaaccgggccaatgtctcggccagcaacgtcttacccgagcccgtcggcccgataagtagaatgttgctcttgcccagttcgacttcttccttcttgtcgcgctgattgagccgcttgtagtggttgtatacagccacggccaggattttcttggcacgttcctgaccaatgacgtactggtcgaggatgccgctgatttccttgggcgcaggcagcttttgcgcgctgctctcggcctgggcttcctgcacctcctcgcggatgatgtcattgcacaggtcgacgcactcgtcgcagataaataccgagggtccggcaatcaacttgcgtacttcatgctggcttttgccgcaaaaagagcaatagagcagtttgccggagtcctcgccgttgcgggtgtcagtcattcgatcgatccaatcgggaaggcttgaaatacaagatgaaggcaaatgcgggcattttcaagggcacgcgacggcgcacatgacggacgcccgctaacgttgacctcctggaccgtatcagaccggctgttgacgcttctcgtgaacagcgtcgacgacgccatactccagcgcgcgggtagcgctcatgaagtagtcgcggttggtgtcacgctcgatcgtcgccagatcctgaccggtgtgatgcgccagcagctgattcaaccgctcgcggatgtagaggatctcgcgcgcatggatgtcgatgtccgacgcctgaccctggaaaccaccgagtggctggtgaatcatcacccgggcgttcggcaggcagaaacgcttgcccttggcgccgcccgcgagcaggaacgcacccatgctgcaggcctggccgatacacgtcgtcgaaacgtcggccttgatgaactgcatggtgtcgtaaatggccatgcccgcggtgacggagccgcccggggaattgatatacaggtgaatatccttctccgggttttccgcctcgagaaacagcatttgagcgacgatcaggttggccatgtagtcttcaacctggcccaccatgaagatcacccgctccttcagaagacgggaatagatgtcgtacgcgcgctcgccacgagcagattgctcgatgaccatgggcaccagcccaccagccgcctggatgtctggtgcttgcataaacggattgccggacatttccaacgaaactccctagtcatgccgcaaagacataagccagcgcgaggctggcttatgagtatgcatataaacggttgaagagactcaggcagcttgcggagcttccgcaggcttcactgcttcttcgtaggagaccgatttgtcggtcactttagcctgctgcaggacagtatctacaacttgttcttcgagcacaacagaacggacttcgttcaattgctcgtcgttcttgtagtaccaggatacgacctgctccggctcctgataggcggaagccatttcctcgatcagctcgcgcacacgcgcgtcgtcaggcttgagctcgtactgcttgaccacttcggcaacgatcagacccaacacgacgcggcgcttggcctgctcttcgaacagctcagcgggcagttggtcgggcttgatattgccgccgaactgctgaaccgcctgaacacgcaagcgattcacctcgttgtcgatcagcgccttcggcacttcgatcggattcgagctgaccagaccttccatgacctgattcttcaccttggtcttgatggcttggcgcagctcgcgctccatgttcttcttgacctcagcccggaacccttccaagccaccttcctgcacgccgaactgcgcgaagaattcttcgttgagctcaggcagctggggagcttcgacgctattgaccgtcacggtgaactcggccgttttacccgccaggtcgagattctgatagtcctcggggaacgtcggggtgatcacccgctcttcacccgccttggcaccaatgagtgcggactcgaaacccggaatcatgcgaccggagccaagcaccagttgagtccctttggccgagccaccagcaaaggcttcgccgtcgatcttgccgacgaaatcgatgttcagctggtcgccgtcttcagccgcacgctcggccttctcgaagcgggtgttctgcttacgcaggatgtcgagcatgttgtcgacgtcagcatccttgacttccgcctgcagacgctcgacttcgataccctcgaagcctgcaaccttgaactcgggaaatacttcgaaggtcgcgacgtactcgagatccttgcccttctcgaacaccttcggctcgacggccggtgcgccggcagggttcagcttttcagccaccacggcctcatagaaggtggcctggatcagatcacccagcgcttcctgacgtgcggccgcctcgtaacgctggcgaatgacgctcatcggcactttgccgggacggaaacctgggatctttgcacggctggcggtctgttgcagacgcttgttgacttcggtctcgatgcgctcgaccggcacgccaatggtcatgcggcgctcaagagcggaggtgctttcaacagaaacttgcatggattttcctcgttgcacagacataagccggcgttccggccccagaatgggcaagcattctagtggctcgtctcatagaagtcaccccgcgcgtatgcgcgcttgcccactgaaacctgctccaacttccggccgcttcgaccgcagcgacatcaacgtgaaagcatcactgcgacatcatcgatacacatgcaacggcgggttcgctggtctatgttatagaagcgctgatgccagagcccctggtgccttagaggaagcggcaatcatgactgacgacattggaaaattggtactgaggttatcggtgggagtgctgatcctcctacacggcatatccaagctgctcaacggcgtagatggcatagccggcatgctgagcggccatggtctaccgacgtttctggcctacggcgcatacctgggtgaagtcgttgggcccgtcctggtcatccttggcctgttcacgcgcgtcggcgccgtactcatgatcggcaacatgctctttgccttcggcctcgcccacatgcagcagatcttctctctaagccagacgggcggctgggctcttgagttgcagggaatgttcctcttcggctcgatcgccattgccctgctcggggctggcaggcacagcgtcggcgggcttcatggccgatataactgaagcaccatagagcgccaccagacgcgggctcgcccgcgcctcggcagccgcggcgatgcccactcgatgcagtgggcaatgccttgcggcgttggctaatatcagtgacatgacagctacggttccgattcgtcagccttgcccgccagccgcatgcatttgtgggcgcgagcaattgttgcagaccccgagcaccgatctgcgcattcttcgcctgacccgacacgaggaaagccgcctgctggagcgcttggaaagcctgacaagcctggaagatctggagcatatgcaacaacgaatgtaccagcagctaggcattcgtctgcacattgcgccgggtttcaacgaagtgcgcagcatgcgaggtatccgcatcgagctggacgacctgccaggactctgccgcaaaacccgccagtcgatacctgcctcgatcaggcgcgcattggagaggcgcccagagatagcctatcgcctgttggatgcacacgacctgttgcgcgacgcctaagcccagccagcacatgctggctctaggttcgatatcgctcctagccacccgggtagcagcatgcacgtggccgtcaccgtcgtaacgttcgccatagacacaccagtagaggcctgcaaccggagctaagcgcagctagcgggcacttcgacacagaactccagcgttcagctccgctggccgccgagtcgccagcggtgcaaccgctcggcccaaccaatggcgcgtgccggcctgcgctgctgccgccaggcaacggcaactactcgactggcttcgcccagggtcgccccgagctgtacggtgttggcgagtttgttcagcccaagcttgtgcttcatcgccaggacgaagccggcaagcgtctcgctggccagatcgccaacgatggtgaccccgaggatgcggtccttgccacgctcggtgagcaccttgacgaagccgtcatcggcaccctcggcgaccgccccggctatggcaccgaggctcaggcgagtcacctcgaattccactcccagcgcctgtgccttggcctcggtaagcccgaccgaagccacctcgggcgaggtgaacacggcgtggggtatggcccgctcgctgaccacgaaccgtttgaagcttccgaacagtgtgttgaacgccgcgtaccagccctggtgctcggccacgtgcggggcgccatatggcccggccacgctacccactgcataaatattgggaaaccgggtcgccaggtactcatcgacttcgaggctgccatcgtctacgcaacacagccccagcgcttctgtgcccagcccatcgatatcggcgcgctctccaagggccagcaagacgcggtcgaacggcaggatctcctctccctcgtcgtcgacagcgcagaccatccggtgctcgccattggtttcctcgacacgcagcggcgacaggccaagccgtatttggacgccgtcggcagccagcgcggtcatgatcgctcgggccgcctctgcatcttcctcttcgagcaatccctcacgctcacagaccagcgtgacctgacagcccagccgctggaacgcctgagcgaactcgcaggcgcccgcatcggcgccgagtatcagcagccgctcggggcgttcacgcaggctccagaggttatcgcaggtcaacggctcggccgcctcgagaccagggatcggcggaatccatggccggctaccggtggcgatgacgatggcacgggtagccagggtgcgaccgttcacctcgacttcccaaggggatttcagccgtccttcgcccattatcacctcgaccccgaggtcggcgtagtgttcgggcgaagcatcttccaccgctttgtcgacgagtcgcttcacctgcgtcatcacctcggcgaaatcaatatcattcgccgactggctaccggccgtacgcggatcgtgacgcagcgcatgcaccagtcctgcagaactgctcagggccctggccgggacgctgccttcatgcacggccaccccgccgagacgctgccgttcgatcagactcacccgcgccttgaatgacgcagcgatccgtgcggttgccaggccgccggtgccgccgccgatcactaccagattgcgttcgaagcgcttgggcttgcgccagccacggtaggctttgcgggccttgtacagcgtcagcaaccgggtagccaggataggaaacaccgccagcaacaccagcgtgccaatcatgctcggtgaaagaatgccggacagcgatttcaggcggaccaactgctgcccagcattcacatagatcgcatgtcccggcaacatgcccagctgagtggtccaccagaaggtccacatactcacccgagtcaggcccagcgccgggttcagcagcacgaaaggcaccagcggaattagcctcagcgaaaccaggtagaaggtgccgtcgcgcgccagtcccttgttaatgccggttatctgcttgccgaagcgcttctgcacccaatcgcgcagcatgaagcggctgatcagcatggcgatcacggcaccgacgttcgatgctatcgagaccagcagcgtgccttccaatagtccgaacagggcgccagccaacagcgtcagcaccacggtaccggggaaagacagcgcagtgagcgcggcatagccgaaaaagaacgccccacgcgcccaccaggggtgagcctgcacctgtccatgcaaagcgccgctatgcgccttgatcgactcgagcgtcaggtactcgccgagatcgaagatgaagaagcaggcgaccgctgcaatcagcagagccagaatgatgagtcggctggccttcattcgcgcgcaggcctcttcggctcagacacaaactgtggcaagacgcggtgaaatttgaggttacagcggtaggcatgcatcaatgaagcgctctcgtgcggctcaacccttggagcctgcaagcgcgcggtcgttccgagttcagttcacacggtgcatcggcgcatgccccagctaggtctgggcgcccctacgatgcggctgcatcccctcaaatgaactgcatgaagcataacaacgactgagctatccaaaagcgcggctatttatcgatggcacctgcaggagagaagaacgatggcaagccaccactgcgcgttgcagcaagctgctctgccagataccgactcgccgcgcatgtctctttcctacaacgcacgcgacggcttaggtgatgaaatcacagagcgcccagatcactaggcgctctgtgcgtttgagagcgtttgctcagccagcgttacgagccgatctgcgcgcccccttccctgctcgccaagtggcgaacccgttcaatcacaacggttctaagggcctggacattcacacccaagtgctttttcgacacagccaacccatacgccgcaatctcttcgctagtcagttccgctccatcctggcccacctcgatcagcagagccccacctttcaatagagagacctgaaggttcaaccaggtgccacctgagagtgggacaagaccattcgagctgacaatactggttcgctccaataagggagcctgcctgacgagcgacgcctcccgttccaatgtaatgctgctgcccagatccgtggccgcgtacagaccctgtcctatcgagggttgccctgggtcgcggtcatagagagccagagtgttcgtagaggccggttcacgttgagcatcttcaagcgcgaagctaatgattgttcccatgctgagcgaggaccctcgcacaaccgcagcagcctcgcctgaaccgaccggcggttcggggcgttccggcatagtgcggtacagcgcatccgtaagcattggccacgtaccggtcgaagcttccagcacgggtcgattggtggagcgatcaagcgacagctccgtgccgttcgcaccgctcggctctgcgatcaaacccgctggtacgtagtacggtgcctggatcgttgcctcaccaaacacaggcgaatcagccaatgcatagttgtcagcatcgtcaccgatcaactgcaagttcacagcgaccgctttgtcctgtcctgcggccggggtggtgaactccgctgtacctgaagcgccgatatcgtcgccggtaatcacaccattgagccgcgtatcacggatgaccgcagtgccactaccgtcgtagaccttatcggcaatatcgacaacggcggtgatggttttccggtcaatgtcagcggtgccgatctgcgcgctggtatcgaaggcatagttgtttgcctcgtcaccaatcaggccgatgcccgagccgctcaccgatttgtcctgaccggcattcttgtcaacgaagctgccggtgctgccgctggtgattaccttgccagcatcgccagctaccacgccgaccagctgcacattgctgagatcggccgc

SEQ ID NO: 23 - DNA, 156292 bp, Pseudomonas sp.
caaactccccgggggggggggcctaccggccgcgccatatccaccacctcaccggcatcaccctcgagcaggccgaccatatctatgtggtcctgcaacaatcgctcagtcatctcaaggacgccgcccgcctggtgcgcatcatgcgcgaggacctcggcatccgtggcagccgcctgcaaacggtggtcaatcgctatgacaaggcggccccggtcggcctcaaggacattaccgatgcgctgaattgcccgggacttcagcggctgccgaacgactacgccgtggtcaatgaaagccagaacaccggtgtgccgcttggcatgcatgcaccacgagcgccactgacgcgcagcatcggccagatgagccaggcactgctcggccagcagtccgccgagtcggggctgctgaaacgtaccttcggccgactcttcaggggatgaccatgctcagcgaactgcgcaaccgcctgcaggcaggcaagcgaacctcaacccggcaggtggagccccggccaacggccgagcccatcgacggtggcatggcgtgggagttgccggcggccgagtcgttgtacgaaacccgcagccagctcaaccccaccgatgccgaatggcgggagcggatctaccagcaactgctcaaggtcatggacctttcgctgatcgacgcgctcgagccgagcgatgccctgtggcagattcgcgagatctgccagcgcctgctctacgagcacgccgcgccggtcagcgctgccagccgccagctgatcatcaagcagatcggcgacgaggtgttggggctcgggccgctggagcctttgctggcggatgcgacggtggccgacatcctggtcaacggtcatgcctcggtctacgtcgagcggcatggcaagttgcagcgaaccgatgtgcgctttcgcgatgatcggcacctgctcaacatcatcgaccgcatcgtttccggcctggggcggcgcatcgatgaatcctcgccgctggtcgatgcacggctgaaggacggctcgcgggtcaacgccatcattccgccgctggccatcgacgggccgagcctgtcgatccgccgtttcgcggtggatctgctgaacgccaacagcctgatccagatgggcaccctgacgccggccatcgcgctggtgctgaaggccatcgtgcggggccgcctcaatgtgctggtgtcgggtggtaccggcaccggcaagaccaccatgctcaacgtgctgtcgggcttcattccgcacaacgagcgcatcgtcaccatcgaggattcggccgagctgcaactgcagcagccgcatgtggtgcgcctggaaacgcgaccggccaacatcgagggccgtggcgaggtcaatcagcgcgagctggtgcgcaacagcctgcgcatgcgcccggatcgtatcgtcatcggcgaggtgcgcgggcctgaggcgctggacatgctggcggcgatgaacaccggtcacgacggctcgatcaccaccattcacgccaacacgccgcgcgatgccctgggccgcatcgagaacatggtggccatgagcggcgcaacctttccggtcaagtcgatgcgccagcagatcgcctcggccatcgacgtggtgattcagctggaacgccaggaggacggcaagcgccgactggtcagcgtgcaggagatcaatggcatggaaggggaggtggtcaccatgaccgagatcttcgccttcgagcggcgcgggctcgacgagcgtggcgaggtgctcggcgattaccggccgaccggcatggtaccggccttccgcgacgtgctggccaagcgcggcatcgaactgccgctggaactgttccgcccggactggatggagggcatgcagccatgagcaagctccccagcgagttcatcctgatctttctcggcatgatcttcgtcgcggcgttcctgctcagtcaggggctgacggtgccggtgttcggcgaggcggggcaggtgcgcaagcggatccgcgcgcgtttgcatctgctcgaacaggccaatgacctgcccaatatgcaggtgctgctgcggcagaagtacctcaagcgcctgtctccgctggatgcggccctggagcagtggccgctgatggagcggctcgcgcaattgatcgagcagagcggacaccactaccgtgcccaccgcgtcgtgctgctcggcgcggtgctggccgtgctggcggcactgggcggttggctgctgctgccggtgtggtggtgggtggcacctgtgctgggcttcgtggcgttctggctgccggtcctgaaaatcgcccgggaccgcagcaagcgcttcgcgacattcgaggaaggattgcccgacgccctggattcgatgtgccgcgcgcttcgcgccggtcacccgttcaacgagacactgcgtctggtggccgaggagcagcggggcgcggtggctcaggagttcgggctgactttcgccgacatcaactatggcaacgatgtgcgccgcgccatgcttggcctgctcgaacggatgcccagcatgaccgtgatgatgctggtcaccagcatcctcatccaccgcgaaaccggcggcaacctgaccgaagtcctggagcggttgagccggttgattcgggggcgctttcgctttcagcgcaaggtcaggacgctgtcggccgaaggacgcatgtcggcctgggtgctgatttcggtgccattcgttttggccgccgggatcatgctgaccaccccggaatatctgccgctgctgatcaacgaaccgatcggccagcgactcagcgtggccgcgttcggcgccatgctgctgggtatcttctggatccggcggatcatccgcatccaggtctgagcgagggcagggtcatggattacctctacgggctgctggcaagcgtgatcggcgacgagcaatgggtacgtctggttttcctgctggccgtcgcgctgagtgtgggcctggctgcggccaccgtcgcggtgctggcgatggggctgcaggacccggtccgtcggcgcctggccgtgatcaagcgcggcggcgactggagccgtggcgaggcgccgcaaaacggcttgcagttgctgctggagcaagtggggcagcgcttcgtcagccaggatgcggggcaggcgcccggcacacggatgctcctgctgcatgccggctttcgctcggcctcggcggtgcaggtgtattgggcgacccgggtgctgctgccgctgttgctgctggtgggctcgttgctggtgctgccgttggttaccaccgtcagcgtgacgagcggcttgctggctgccggcatggcggtcgggctgggctggctggcgccggcgctgtacgtcgaaagacgcaagaacgcccggcagacgcggctgcgcggcgcgtttcccgacgcgctggacctgatggtcgtctgcgtcgagtcggggctggcgctgccgcaggcgatcgagcgggtcgccgaagaaatggcggtgagtcaggtcgagctggccgaagaactggcgacggtgaatgccgagatccgcgccggcatccccagcgccacggcgctggcgaatctggccgagcgcactggcctggaagacatgcgcggcctggtcagcctgctggcgcagagcatccgcttcgggaccagcgtcgccgacaccctgcgcatctacgccgaagagtttcgcgatcgacgtacccaggctgcggaggagcaggcggccaagatcggtaccaagctggtgttcccgctgattttctgcctgtggccgagcttctttctggtcgccatcggccccgccatgatcggcgttctcaaagcgttcgggagattatgagatgagagctatctgtctgctgctggcggtatcgagcgtgctggtcggctgccagtccatgggccctgaaccgggcgacgagcgctccatctattccggcagccactcggtgctgtaccgcgcccggcagccggccggctcgctggagcaggccttgcggcttgccgacatggcttataaggccggtgatctggaccaggcgctctaccagtacctgcgtgtgctggagctggaccccgggcgtcatactgcgttggtctgggtgggccgcatccatcgcgagcgcggcaacatccagctggccgagatggccttcgacgatgtgttgcgcaaggcgccgaacgacctcgacgcgctggctgaaatgggcatgctgcaactggccaagcgcgatcaaccgaaggcacgcgagctgctctacagggccgtgctgctggaccagcagcggcttggccgggatccgcacgatgggctgccggccccgggcgcgctcacggtggatcggcagtccccggtgcggctctacaacgccctgggtgtactggccgacctcaacaacgatttccccctggccgagcagtattaccggctggcgctgcaagtcgagccgcgctcgctgctggtacagaacagccttggctattcctactacatggctggccattggcaggaagccgagcgcacctatagccgcgcgctcgaccaggacagcgcctacgcgccgctatggcgcaattacggcctgctgctggcgcgcacgctgcgttatgaggaggcgctgtcggcgttcgagcagatcggctcgcgggcccaggccagcaacgaggtgggctatgtctgcctggtcgagggcaagctggacgaggccgaacagttcttccgcagcgcgctggagcagtcgccgtcgcactacaccatcgcctgggacaatctcgagcgggtgcgccaactgcgcaaaatccgccagatcgccaacggctcctagcgctgctgaccggcgttgccggctcagccctcgcctggttccgcggtgttgagatgggcgatctcggagcgattgcggccgtgctgcttggcccggtagagggcgccgtcggccagtttgaggacgcgttgcacgtcagcgtggtggctgggccagacggcgatgcccagggaaatggtgatatggccgacaggggcgacctcgtcctgctcgacgcaaaggcgcaaacgctcggcgacccgcaaggccgattcgatgttggtgttcggcaacagcatcaggaactcctcgccaccgcttcggcagagcacgtcagcgtctcgtgagcaggcagccatcagatgggcgagatgtcgaatgacctggtcaccgacatcgtgcccatggttgtcgttgatgcgtttgaagtggtcgatatccagggcgaccaccgcgaacgaatggtcggcggcgccgagcgcctccagcgctagcgacaggccgcggcggttgtacaggccggtcagcgggtccgtctgtgcgtcgaggtggagtttgccgatgcgttggtgcagcaggttgatgcccagtttcagggcgcgcttgagttgtgcggcttcgaaataccaggagcggatccgctggatgcgctctgcgctggtgggtgcgtccatctcgcccgcgctcttggccaattgccagagcggacgcgagatcagcccggacagcagccagacgccgaggaaggtcagcagggccagcggggtggtctggcgcagcacttggagcatcaggccatcgagcgggtgcagagtcgcggcggtggggcgttgcgcgacgatgccccagcgggcggtcggcaccgccgcgaagccggccagcatgtcctggccctggctgtttatgacacgctggctgcctgattcgccgctgatcacgcggtcgatgacggtgttttcgcccaccagggtaccgacgcgctggggatcggggtggtagagcaaccggcggcgctggtcgaccgcgtagagataggagccgtccttatagaaatgttcgccgagcatgctgctgagaatattcggctccttgaggctgatgatgccgccgacgtagccgagataggtgccttgcttgtcgacgatcggctgcgaaaccgagatcaccagcgtgccgatggccgagacgtacggattgctgatcaagggcctgcgttcgcgcaacgcttcacgtgcaccgggcgagtccagggtgtggccgaccagcgccagaccggtcggcgaaacggcgcgaatgatgccgtttgcatcggtgaccacgacgctgttgaagctgtttgtttgcaggcgcagccgttcggtctcgctgccgagcgtatcggcgtcgaagcgttcggcgaggatcctggcgctgtacccgagctgctgttgcagcgtggcgaagaagccttcggtgccgaccgcgagcttgacggcataggccctgttggcttcgagggtgctttggatgagcgattcgcgctggacctgatagctggagtagaaactgatgctcagcatgatcaggccgctgaagattgccagcaccacgatcagccgccgcaggtctacgcgaaacaatgaagcaaaagacatgggcttttattgccggtcgtagtaaggggcgacgtgcatggtagggcgtttgcaaggacggctccacaccagcggcgagttaatcgacaaccgaacaggctcgatgactgccgcgaggccgcagttacgttggctgcggacccgctcgggtatgtgccgaacaccggggcgtgaacgctgccaaactgaaggcccggcaacgataatcgcgcccacctttgttaggatggccgcattgatttgaacggatagctgctgtgatcgatagccaaacttcatcgccaacgagctctgcccatgttccgactggcgttccgggactcgacgcggtgctcaagggcgggttgttgccgcgagcggtctacatcgtccagggcgggccgggcgagggaaagaccattctggccaaccagatctgctacagctgggcggcccgcggcgagcgctcgctgtacgtcaccttgctggctgagacccaccatcgcctgctgcgccacctgcagaacatgtcgttcatggacaaccgctatgcaggcacctcggtgatctacgaaagcgcgttcgacatcctgcgcacggatgggctggaaggcatccttcgctacctgacgcgcaacggcaagcgccagaatccctcgctgatcgtgatcgacgggctcttcgcgctggaagaaaacgcggcctccgagcgggtgtttcgcgagttcatcaatgacctgtcggtctacgcggacgtggttggctgcaccgtcctgctgctgacaaacagcaagcgtgacgccggtagcccggagttcaccatggtcgatggctggctgaccctgggcagcgacgaggatcatttccgcacctatcgctacctgcaggtgcgcaagttccgcggcagcgatttcgtctccggccggcacatgacgtccatcaccgaggatgggttccgggtgttcccgcgactcgaggccgtcaccgcagaccaggcttcggcaccgatgcgcgaacaacggctgagcacgggcgccgatgggctggaccagatcattcgtggcggcattccgtactcctcgacgacattgctggtcgggccgacgggggtcggcaagacgaccctgggcctgagcttcatctgccagagcaatgcgcaggaacctggcctcgtcttcggcttttacgaggatgcgcatcgcctgcgtcgtcgcgccagcgccttgggcctggacctcgacgggttgatcgacaaagggctggtcgaagtgattcatcgatcaccgaccgaactgctgcaggaccagttggccgaggacattctcgaagcggttcgcaggcgctcggtcaaacgcttgttcatcgatggcgtcgatgcgttcaagcaggcggcaatcaacaccaatcggctcggtcgcttcttcagcaccttgaccgccattcttcgcagtgagggtgtgaccacggtgttcaccgccgagctggcggaaatcgtcggtggtgacagcggcctgcagttcccggcggtatcggccatcgccgaaaacatcctgctgctgcgttatgccgaactcgaatcgcgactctaccgaacactggccatattgaagatgcgggaaagcgacttcgagccctatgtgttcgagttcaccttgggggagggtggtttcaggctggggcggcgcatggagcataccgaaggcgtcgcgatcggccgaccgcatcgccaggctccgccagggggcgaggatgtctagggaagggcaggatgcgctggcgccacttgtgctgctggtcgaggacgagctcggcctgagcaaactgatggtgatgattctggaggacgagggctatcgcgtcgctaccgcgagcaacggggcgcagggcctgcgcatgctcgagcaggaaaggcccgccttgatcatcaccgactacatgatgccggagctcgacggtgccgaaatggttcgtgccattcgccgtaaccctgcctatgacggcgttccgatcctgatgatgagcgctgcgctgactcaacagattccggggcgcgacctggtcgatgaattcctgccgaaaggcaccgggcttgccccgctgatcgatgccgtgcgacgcctgaccggcgaaggtgcaggcagcgctgagtcagacacgccggacccttgaatcgcgaccatccgatgctggctcaggcaggggtgatgaagtccgtttcactccgacgcctacctccgcccggcagatagcgtttcaactgcagcgccggcagctcgacgaaatgccaggacagcgcggccacggcaatgctcaccgcgaggctgatcgccatgaaggcacccagcgagacttgcgcatcgaacgcatgcatcagccactgctggattggaaagctgaagatgtagatgccgtacgagaaatcaccatatcggccgaatctcgacagccgcggtatgggcaggtgggccagatagatggtcaggtaaggcagcgtcagcacatgaatgtatggccatagctcggttcttgcgctgagcagcgacaacaccagcaggcccagcgctaccttccagttccacggcacgattcggcgatacagatacaaggccgagccaaggaagaagaacatgcccagccgcgtcgtcttacgcagcacgtcgctttcaatgccaagtcccggtatcaggtagaagtgaatgagcatgagggccaagggcaccgccagcaccgcgactcggccaacgaggccgatcagccccagcagcatcagcgaggtgtacatcaggacttcgtagggcaaggtccagaccgacccattgaccgtgtccggaaacggattttcggtgaataccccgggcagatgaaactgagtgatcagtgccatgttgccgaggaagtgcagtgtctggctgtgcagaatgtagtctctcagcggcatgccggttaccagcggcccgacgatcagaacggtgagcagcaccgacatgcacagcgccgggaatatgcgcagtgcgcgcttggccgcgaagtccatcacgctgcggctgttcaaccatgaggcagcgatgagaaacccgctcatcacgaagaacaggttcaccgcgatgtcggccgtatccaccgaaccggtgaaccgccgcatcggttcggtggcaccggcaccggaaagccagtagcagtggccaagaacgacggcgcaagccgcggcgaatcgcagaaagtcaaaattgttcgcgtcacgttgcagggaagcgacatccatgggcaatgccttcgctaaaacgggtagggcgtgagccgccaaggcggtcaacgcaacggaaaggtcttgctcatgcccaaggcaccgctttcgccgtcatggatggcttgttcgatcaacgccaagcgttgtggggcgttacgcagccgagcgaccaggcgcagcaggatgagaaacaggcaacggttcagacgatgcagccgaggggaagcggcccagacgttcttgtcgaaccaggcttgattgcgcgcggcgtagtaggcgcggaaatccgaatcgccgagcaggaaggtctcgtagatgttgcgggtccgcgccttgatgttccaggactgctcgagctcgtcgatcaccgcgtcggtgaacaggaacaggcgcccgccaccggcggtgatgcgtcgggtgtattcggtgtcatcgacatacagcaccagctctttcagcgggacgccaatgcgctcgtacaagctgcggtgggcgagcatgccgccgtacggcgcgaacggcaggctgatgcttgtcggccgtttgccggggcgatgcgtccagggcacgcgtcgccatagcttgtacggcagctgcgcgacgtgaaagccgaagtagctggagcggggttgcaacaggtagcgcagcggcacgccttgggcgatatccgcctgttgcgtcgcgcggtagcccaatacggcaacccggtccgcgcccagtagtccgccaagccgggccagttcacggtgaagaatggacaccgccgccgcagtgggtgcgttgtcgtcgtccatcatccagatgtaatcggctccgccagccagcgcagcctgcagcgcgacggcgtagccgttcgccgagccggtgttgtgttgcagccgaatcaggcggaccttgtctggccagcgtgctgacaattggtccaacggcgctgacgaagcattactcacgatgatcacctcggcgatctcgtcgaacgccagcgcgcgctcgaccagttgctcgaggtaagccagccgatcaccgtaggtgacggtcaccacggaagttttcagggtcatgagtgtctcggcatgaagcgaaaaagcgacggccgcgtcaggcgcagatagcgctgacgaggcgttgagcgtcgttggtggatgcctggttcagaactcgccaacggtttccgttggttgtgcctcggcgggagccgtggcgggattcgcgtcgacggtgtcgtcctcatcgtctgctgcgaagaacgcatggaaaacactgatcagccgggtcgcgccgggcatacccggcagctccggggcctggaatatctcggtataggaataaccatcagcgtaaaccagcgattggctgttttggtctgcactgttcatgacgcctccagagggggtcgcaggattagaacgagtagcgggtactgtcactggagcggcgatacgcctcgcccgaaagtggctcggccaggcgcactgtcggcagcgcgatcgcggtggatccgctgccctggcaggaccctgggttggaacgagcgccctgatcgaaaatgatcacccgtggcccacggttgacggcgcagttggagctgtcctcggagaaactcgcctgccgttgccgggacaatccgtccgttccgtgctcggccaggtggacggcaccagtcgtcccgctgatcagcaaggcgaagcttaatacgcaggaggtctggattcgttgagtggtggttgctgtgttcatccgtgaaacctcgcagtaagagggggctgttcaggcgtgcttcatgggcaccgccgcagggtagaccgggctgacgcttgtaggcgttacggttgggcgatgcgggagcgcatcctgtccctgatgcgaaatgacttcgcgagttctagtatcgacgaaagacttaatctcctgcctgaatcgttcggttgaaaaacgctccgcgctggcccggcaaacgtcgggcagaatgtgatgcgcttccgcttcgaactcctgaacggccgccatcagcgattcaggcgtctgctcggggtagaacacgccagttggttccgggtggtcgattccccgtaccgtttccagtacgccgcctctgccataggcgatcaccggcgtcccacaggcctgagcctcgatgggcgcaatgccgaaatcctcctcggcggcgaacacgaaggcgcgcgcgcgttgcatgtgatgcaacagcaccgcgaagttctggtagcccatcagggtcacgttgggggtggctagctccctggccttgtccatttccggcccggtgccgatcaccaccagcttcttgtcgggcatcctggaaaaggcttcgacgatcatcgggatgcgcttgtagggcaccatgcgcgaggccgtgaggtaatagtcttccttgtcggcatagagggtgaactggcgggtttcgacaggggggtagatcacggtcgactcgcgccggtagctcttgttgatgcgccggccgatgaagtgcgagttggcgatgaactcgtccacgccgctcgcggtgcgctggtcccacatgcgcatgtagtgcagcagcatgcgcgccagcttggccttgaaaccatggtccaggctggcttcgtgcagatactgatgctgcaggtcccaggcgtagcggatcggcgaatgcacatagctgatatgcagctggttcggcccggtgagcacacccttggcgacggcgtggctactggaaatgaccaggtcgtacgccgacatgtcgagttgctcgatggccaatggcatcagcggaagatacttctggtaatgcgttttggccttgggcagttgctggatgaaggtcgtcgtggcgcgtttgccaccgagacaggctcgatcttcatcggaaagaaagtcgatcacggcgaacaggtcggcttccggccaggtctcgagcaacccggcgagcacgcgttcggcacccgcataggtcaccagccaatcatgaacaatggcgattttcatacgatagcctttcgatagagagggcagcgggacggttgccgaggcatcggcgaccgagaaatttcaggccgcggcgcggcggatgccggcgcagcggtgggcagggtccgtgcggataggcagcgctcagtgcttgggctgaccgagcggcagttgtcgcaagccgcttttgccgccgttacgcacaccggtgaaggcctggtcgatcaggcgagaaacctgctgtgccgatgagttccagcagtaccgcgccacattcgccttgccgcggcggcgcaagtcctgccgtaacgcctcgtcgcgcaggacgcgttgcatgcaatcggcaatgtccttgactttcagcgggtcgaaatacagcgcactgtcgcccagcacctccggtatggacgccgcccgggcagcgatgaccgggcagccgcaagcctgcgcctcgaggggcgggatgccgaagccttcatacagcgaggggaaaacgaacgccgtggcgccctgatacgcctctaccagctcctgatcggtcagcctgcccagcatgcgaatgcgccggctgccggccatgtcgtgcaggctgccggaaaacacccggttcgaatcgccgatgatgcgcaactcgacctcgtcgaagccttcgagcttgaggaacgctgccaccatgcgggcgaagttcttgtgcgcgctgtgcgatgaaaccgcgagcaggtagggcgccgagccacgaggacattgctctgcgcagaagggttgaaagcgcgcgtccacggcattgggcaccacccagatgtggcgtgccgggtaaccatagaagcgggctatttcctgccgggaaaattcgctcacggtgatcagcgccttgattcgtttgagtaatagtggggtcaggttgcgataggtggccctgaatgctcgcgagtagctttccgggtgccggacgtaggtgatgtcgtggtgagccgcgatctggttgccgtaggccagcggggcggtgttgcacagtgagaccaggggcgggctgccgttgcgcaggagccaaagcggaaggtccagttgctcccagagctgtcctcggtggcggccgatacggcgcacctggagttgctcggcgctttcatgcaggtggatgtcgtgcggcgcgacgaacaccagatcgtcgcgcagccccttcagttgcaggcaaatctgctccgcgaagcgctgcacgcctcgcatttcctgggtcagaaagcgcgcattgatgacaatcattttgaaattcctcttttcaaaaaagccattcgtgaatcgttggcatcagttggcgctggagccggacacgggtgccttgccgaggctgatgatctttggaaagccgctgagatcgacttccgcggtgcaattgcttgcgcgttccgggcagctccatgccgcgtcgctgtggatccggccgtcatccggatgagcggtgtcgatcaactccaggcggccgctggccttgcccgccgattcgatcgtcagcgtgcgggcctgctccgggctccaggccaccagcagctgctctgcagcgttgccgaagcgcaacagcacggtgcctttttccgattcgtcggcgtgaccgaggaagcggtagtcacggatgatcgggctgatcgccttgagtgcccgataggccggcttgagggcgtagtcctgtcggagcaggccgaagttgtgctcgcgctcgcgtacgttggtaccgtcgttgcgccagtcgtaccaccagtaaccccgcacgttggggagggttttggcgaggaagaaactgcgcaccagataggcggcctgcaggttctcgtcgatgccgcaggaaccctgatacgccggccagctcatctccgtcagataaagcggcaccggctgaccggcagcgctggacagttccagatcgacgtcggcgagccattcgatccaggcctccggtgtgttgtgcccgcgcccgcggcaatggacgtaggggtgcagcgagaggccgtcgatcgattgcatcacgccggcttcgatcagccgggtggcgaaacctgattcgatgccctcggtggtcaccgcgccggccagcaccttggcgctcggatcgtgctggcgaatgatgcccgcggcatcggcgatcaaccgtgcatagtcttgggtgaattgcgggtcggtcggattctcgacgtcccattcgttccacacttcgtaatgcttgatccggcctttgaactgctcggcgacgaacgcgacgtagcgattgaaggcgctgcgcaccggttcgctgcgcggcttttccccagcgccatgaaaagagttgccatagccgaggatgaacaggctatcgatcccctgggcttcgttgctcgccagatagtcttgccagtgcggttccacctggagtcgatcgcgctttcgctccagaaaggcccagtgggcatcggtcctgaccgacgcgatacccgcgtcgtgcagcagccggaatccctggctctgggtatttcgcagatgcaggtcatgcgagcagaccccgaggatgaaggggtcttctgcttgttgtgctggtgcctggatggccaaggcagacagcgctgccaccagtgccaggcggcgagtcaggagacgtgggctcatggctgctcacccctcggtccccagccccgcggttcgtggccggtatgtgggctcgccgtgacgatgcgtcggtacggggcgggcaccgtctgcggcgtcagcacatgggcgatggccatgccgagaaacagagtagcggtggtgatctccagcacatccgtcgcccaaccgatcaggcaggtgcagaagacgatgcccagtagcgcatcgcggatgcgcgggccgcggtcatgcaagcgcaagagcagcgggaacaacagcaggtacagcagcacgccgaacacaccgagcattccccacagatatagcgcggtgttgtcggcgatactcagcagttccagccaggccagcggaaacgccgccgcgctgctaccgaccgcaccgaacccggccccccaccagccccagccttcgttgacgatgacgtcgatgaagttcggccagctgttgatcaagcggtcgttgaacgatgccagcatgctggcgctgtaagcctcgctctgcggaatgttcagcaacaggctggcgatcggcaacgccatgccggtcaccactgcgacgaaaaaagccgtggcgctgggggcgcgataaccggcgagaaacagcatcaccagggtcaacagataagccgccgccgtggatttgttggtggtcaggaaaatcgcaccgaatgccaccgggtaaagcatcaggcgcaacaggcgggaccgcaggaacgccgccaggaacaggctgtacagcgcgatcatcacggccaggttggtcgacatccgggcaaagccggcgagtcggtcggtgctgccaaaagcccaggacttgttcgcggtcaactcgacgtcgcccatcatgtagctgtatcccttccacggtacgttggtgaacatgtccagggcgatgccgatcagcgacgccaccaggcagagtccgatcacccagccgagcaggccggccctgcgttccagatagcggccgcagaacagtccgaacagcagcggcagatagatgaacaggctgaacccgacattccccggcgtggcgccatgcagcagcgccagcagactcgaaaccgccacggcaaacagcaccagccacactgcgggagcgctccgtgcgcggggcagttccagcgccaccgcggccaggcaggccagcttcggcaggtagagcagggcggagacgccggcgatgtcgaggtagtagcgcagcgccccggcgaaggtttcgctgatcagcaacgaggcggcgatcaatgccagcagcgtgggcttgtcaatcgccagcgggctcggcctgggtggcgaaagggtcagtggcgtcggggtcatcgtgggctctccggccgtgtagcgcgccatgcaggatcgattggtaccgatcgagcatgcgctccatgttcaaaaagggtgcgacgctggcacgtgcctgccgcgacaaacgctgacgcagtccgctatcgaggtagagcctgagcatcgctctgccgagcgagtcagggtcgtccggtgaacagagcaggccgttgagctcgtcgctgatgatctccggcaggcctccgctgttcgtcgcgatgaccggcagatgctgggcgcaggcctcgacggcaaccagcccgaacggctcggcccagatcgagggcaccaccagcacgtcgatattgcgcatgaaggtttcggcatgctgatagccgacgaagcggaccttggccggatcggccatggccttgagttgcgcctcgtaatccagcttgccgcgcccggcaatctccagcgtcgcgttgatcgataacgcctgaaactgctcgatcaaccatcccacacccttattgggcgacagcgtgccgatgtaaccgaaacgcagcaggccgctgtgcgggtgacgcggcgcgggtactgctccgtcgccgagtgaggtgctgttgtgcaccacgtggcggctggcctggctgaaatagccgtacgccgatacccgatcgagaatgaagcggctgacgccgatcacggcggcgacctgagtcgaagttgccgcgtggcctcgacggaacgccgcgcacagcccgcactggcgttcgcagctatggcccttgttgaacatggtgtccttcgggcacagcagataaaggtcatgcagcacctgaacgatcggaatgccggctgcgctgatctcgtcccatgccgagactgaccagccggtcaggttgtggcagaccaccacgtccggctgttcgcgcgcgatcacttcgcgcacgtagctgcgcatcccacggttgtaacgatcgcggtaatgccacccgaggcgcagcagtgggttcggccgggtctgggtgaaatgccagtaaaggttgcgcagcccggcgcgatagatccgcacgccgcccagttgctcctcgtgcaagccgtgctcggggccggtggccagcacggcgaggtcccagccgcgggcgtgcaggccctcggccagctgacgcaccactacttccgcaccaccggctacatgcggggcgtacaggctatgcagaaacagaatcttcatgagcgaaccctccctggtgcgtcagtccgcctggcagcggagggccggaccggtttgcgcaacgcagccgctgaggtaacgggtgggcacgcgtaccttctgctcgcgctgcaacagcgtgagcaggatcaccgatcgttcttcgccatctgcgctgacaaagatcgcttcgagttcgttgaaagtgccgccacgcagttgcacgcgctcgccagggcgaaacctcggcggctcgaccggggccgccagccgctggcgcagctcttcgatcagtgcgtcgcgaaccggtgtaggttcgccgccgaaggccaccacccgggcgacaccacgcgtcgagcgaatcgggtaccaattgtccagccggcgatcgaggcggatgaacaggtaaccgggaaacagcggctcacccggcttctcgtcgcctggcagaggaggcttatgcggccggtagcattcgaagtgctggcgtcgaaggttttcttcggcgcgggcttcctgtcggggtttggtctggatcagataccagtgcggatcgctgtcgagcgctgccatgtgaactgccttccttagggtgtgattgcggagttccgttttcgattgttcaagccggttgcgcggcgcgctgttcgatgccttcgatgagggtgaagcgctcgagcaacgcccgggcatcgtcctggttgttgaacatcagcacgtcgatcaccgacagggcgggcacgaacggctgcttgaattgcgggtagctcaggtcgtccatgcgcagaaatcgaagcgacaggccgtgcgacctgaacagcgcggggcagtacagcgacagcccgccgatggggttgatgtagcgctccgcctgcaactgcttggcgatggtgatgacgcgctcctgcttgtccatttgcgctggcaggcccagttccgagccgatacggatcggcgttgctatacccaggtatgcgcacaggctgcggatcgagtgcgcggtgaagcgggccaggttgcgttccggttgctgcaggatgtccgcgatcagggcaagcactcgttcctgctgcggcgcgcgggcataggcgagcttgagcattttcagcatccgttgcgcttccatggggaagtcatcgcacagccagcgctggttgatggcatcgactcgcccacccttgcgcagcggaaaggtcagcagcttcggctcgccgttgaccagtacgcggttacggttgatccaggatgccttggtgtattgcaggtcatcgccgagcacgaagacgtcgctgtgggcgatcagctggaaatagcccaggtaggggaacagatagggctgcatcatcgatacggttctgagcacggcgtttccctcgcatgtgtcaggttttttgagaatagctgtagtaaccgtaagcgccggtttcataggcggtgctcgaggcccggcgcttgacgccgttgagaatcgcgcccttgagcaggacgccgttctgggccaggcgccgcttggaggcttcgatctggctggcggtgcttagtccgtagcgcgtcaccagcagacaggtgcccgccagttgagcgaccagaacggcatcggttacggccagcaccggcggtgtgtcgatgatgacgaagtcgtattcgcgctccgcctctctcagcagcttggcgaagttctcgtgcatgagcagctcggacgggttgggcgcggagcagccgctggcaatgaaatgcaggttggcctggtcggtcttgttgactaccgctgcaaggcgcaggccgctagccagcgcatccgacaggccgctgcgcggtgccatgccgaacattccggcgagataaccgcgacgcatgtcggcgtcgatgagcagcacccgctggcccgtctgcgcgatgaccgacgccaggttgctggagacgaaggatttgcccaccgagggcgtcgggctggtgatcaccagcagctggttgcgcgcctcgagcatggcgaacttgaggctggtgcgcagactgcgcagcgactcgatcgccagatcggccgggtcggcggcgcccaacagcttgctgcgcccatcgcgaacttttctcagtcggtagagctgctcctgttttgctgaaaaaggtagcgcggcatacaccggaaccccgagatgttcgatggtttcgggactctcgatgccccgatagaacacttgcctcagcaggatcaccacggccgaggccagcaggccgacgaaaatggcgaccaataccaccaggggtttgattggcttggccggcttttccacgacggcataggcactgtcgatgatccgcacgttgccgatggtgccggcacgcaggatgtcctgttcctgagctttgtcgagcagcagggtataggtgcgcgtggtgacctgcatgtcgcggttcaggcgcaacaattcctgttgggtcatcggcagggtgtcgatcttgctcatcagcgcggccttctgcgcttccaattggccgatcttcttcatcagcgtccggtaggtcggatgctcgggggtgtagagctggttgtattcggtgcgcttgaggttgtgctcggatatctgcgcctccagcgcgacgatctggtcgagcacgcccttggtttcgatgctgatgtccaccgactgggcgctggtctggtaatcgttcagggctgcttcggccttctccagttgcttgcgcaccagcggcacctgcgagcgcaggaattcgaggcgctgcgccgcctcggcagagctgcgttcgatgttctgacgtacatacagtcgactgatctggtcgagcacccgattggccttgtccgcgtcagggtcttccagcgtgaggtagatgattccggaatccttgccggcttcgcccaccttcagacgcttctggtaatccagcgcggtggtctgcggacgactgcgcaccaccgtgaattcggtacccggacgcgccttgagctcggcgatctggatgctgaacccttgttgctgcacggcctgatggctgctgccgctgagcagcaggtgctcgtcctcgtcatacaggctgaacgtgtcggcgacaccggcgcgcagcgtcagcttttcgcccagataggcgtcaggcacgtccagctggaagacctccagcttctcgccgccccaggcgtagctggtcaggcccagcagtggcgctgcgagctcaccgtccttgaccggatcgtgcaggcgcgcgatgtagccgcccagaagcgggacgtacttggggcgaaccgtgatatagagtttcaacgcctcgaccgtgcgccccagtaccgagcgcgacttgatcaattcgatctcggtgacggcctgggacaccgagttcggccttggaatggcctccggtacgccggtgatacccgcttttttcggttcgatctggatcatcgcgctggcctggtagaccggtgtggcgacgatggcgtaacccacgccgagcagcgcgaaaaagcaggtgatgctgaagatcagcgccttgtgatcgaacgccacgcgcagaatgcgcgccaggtcgatacggttgtccccgtcgtattccagggaagagcgggccatggcggtcattgtggatccttccttgattgttgcggcatcggtgtaacggttgtcaggcaccaggcatgagcctgcgcagcaggttgacgctgatgttctggaaggcctggctcagcgcctggagcttgctgagcggagagatcaaggccagcgcctgggtaaacacctggatcatgaaatattcgaacagcgactgattgccgatccgttggtagtagcgggccaggctgtaataggcatgcatggtcatctggatgcgctgcttgctgctgcgcatggaaaagattccgccctcatgcacgcggtaggcggcaggctttatttccttgaggaacttgcccttgccgtgggcgccgagcagcgaccaccagcagatatccaacacctcgacaccgtgcagttccggcggcagttcatgcaccaggttacgaaagcatgcggtcagcgtggacaccggtcgcccctgcatcagctgacgagcactggcgtcccggcgatagcgcccctgcatgtggggactgcggacgacgccctggctgttgaacatgaaggcgtcgtgataggtcatcacgtaatcgcggtgtttctcgaggaagtcgacctggatctgcagcttgcgtggatctgtccagtaatcgtcgccttcgcaatacgcgatgtacttgccgtgcgcctgggcgaacagccttgtgctgaatgggacgcccttgcggtactggttttcggtttggtagatcggcttgatcacttgcggatagcgcgcggcatattcacggatgatcgtcgcggtggcatcggtcgaggcgtcgtcatggacgatgatctcgaatggaaaggtcgtctcctgccggaggaagccatccagtgtttcgctgatgaaggctgcgtggttgtaggccaggcagacgatgctcagcagcggcacgcgccggtcaccccaggcggccatcaaggcctgttcgcttttcggttgcatgtccatgtcagacgctcgaccgggtcatcagaaggtaaagtcgcagaacgacgggtttggaggtaaaggcgaccagcgtcaggcagatcaagccgctgacggccaagcccagcagaatgtcgaagcggttgtcgctggcgatggcgctgaacaggggttcgccaatcagcaggccgaggccggtcatggcggtaatgcgcagaagatcctgcagccatgggcgatgcaggccggcggcgaagcgtttgtggaccattggcggccagatcaggaacgtcagcatgcgtaacccgaaccagaccagtgctgcgccatatacgccgtgctccagtgccgcatagatcaccagcgggatgctcagtgccgcgctgatcaggctgaaccacacgtgcaggcgcagctggccataggcgtattgcaggtagaactggaaggcggtgatggccatgatcgcgctgcccagcacataccagggcaataccaggcggctccattgcgccgcctcggggtcaccggtccaggcgaaaatcaggtcggcggaatggaaggcaatcacccccgccagcggaaacagcaggctgcagacgaaccgtgtggcattgaggtagagcgtctgcatgtcgccgatccgctcttgcgcgacaagcatcgtcatgcgcggcaataaggtctgcaccagcgggttggtgagcgtcatgatcccggtcgagatcagtgcgaccagcgagaagtaaccgtattccttgagcagcagcacgttggacagcaacaccttgtccagctgcgtgaggatgatccacagcactgacgtcagagacatgccggcggcgaacggcagcaccggcttgaccgccgcccagtcgaaaccggtcagcagcgtcggggtgggcatcagcgcataggccttggcgccgaagatcagcgtttcgatcaaggcgaccgcggtctggaagacgaagaagtcgagcgggttctggctgatgttggccaccaggaacaggccaccgaaatagcgcagggtagcgatcaggatattggcgccgttcagccacgcgtgcagctcgagcccctgcagaccacttttatagagcgtggcgtatagcttgaggccgaccatcagccccatcaggctgatgcagtgaacgatggtcagggtgtcgagatcctgcgcttgcagccagcgctgggcgatccagccgctcgagccgtggatagcgaaaatcgtcagcgacgctacgggcaggaagatgatctcgaacgagcgcagcaagcgtccgggttcgtggcgccggacctcgggacgtccgcgaaaatgcgcgatctggcggaccagtgacggcgagagcccagcgtccagcagttgcagccatgcctgtagcacagcgaaaaacccgatcaggccgtaggcctccgcccccaggtgcccgagatagaagggcaggatgaggatgccgacgagcaaggcatacgcctgcccgatatagctcaggccggtgttgcggatcatcgatagttttcgatcagccatgtaatcggaccgccggaagtaattcagaagagacgcttgcattcgggggcggacaagccgaagcggtgttccatcagcccgatcgtgttggcctgcggccagaagcgctccgcctgtggcggggtgcgtcgggtcgcttcgtccagcagggtctggatcacggtgttctggatcgctcgaggcaggcccggatagatcggcaggcacagcacccggcggctcaacgaacgtgactggatctgcggcggttggggttgcaggtagccgagcgtatccagcgaggggtagaagtagcgcctggggttgatgcctttgccgttcagcgcggtgcggcagcgcaggagctggtcctcgttggccaggccgatcggaaagtagctgtggttgcgttgggaatgcggttgctgttgctgcaggtcgaagtggtcgccgagctgttgctcgtagcgactggcgatttcttgccgttcttccagaatcagcgccatgtcgtcgagaatgcacaaccccatcgcggcagcgaattcgttcagcttcgcgttgatgccgatgccgtcgatgatgtcggtatcgacgatgccgaagttgcacagcaggcgaatcctggcggccagcgcatcgtcgttggtgacgatggcgcctccttcgatggtatggaacagtttggtcgcgtgaaaactgagggtgctgatgtccccccagctgaacaccgagcgctccttgtaacgcacgctgaaggcgtgcgcgccgtcatagaccaccttcaggcgatggcgctcggctactcgcgcgatgccttccacgtcacatgcgttgccgaagacgtgggtggcgacgatggcgcgcgtgtcgctgtcgatgcgcgcttcgatcgcctgcgggtccagattccagctggccttgtcgatgtctgcgaaaatcggacgaataccttcccactgcagcgagctggtggtggccacgaagctgaacggggtggtgatggcgctgcccgacagacccagcgcacggtaggcgatctgcagcgccagggtgccgttgttggtgaggatgatgttgcgaacacccaggtattcacgcaggcgttcctctagctcggtaaccagcgggccgtgattggtcagccagccggatgcatagatgctgtcgacatagctgagaaacttggctttgttgcccaggtacgattgggtgacattgatcatcatggatgtccttatcgtcgtcacatcgagatcggcaggcgttgttcaggtctgttcggtcataccgcccgctgagtaccgaggacggtcgcgcggcgggcacggcgctggttcagcttgagaatcaggcgtgtcgcaaggctgccggcgtgcgggtcgccgaagtgaaagatggcggttgcgcggcggctggcgggatcgcagggctcgtttgcatgcaacgtgcggtagccccagaacagatacagattgcccggaaccaactggagtttttcgggcttcaacaggcgtcgacgaatggctgcagttatcaacttgcggctcagcgcgttctgcagcagtgccttttccaatacgttgaacagtacgttcgagcgtaccgggcgcagattagggaacatgatcagatcgccccgatcggttccgttctggggtatctcgatcggtaacaaaacggtcacaagactggcgtcgtaatgaaagcagttggattcgcgtcgaccggaattcccttgcacgcagcgcaacactttcagtacttcgtcgctgaaggcggatttcccggccactgcgtgatagagactcgccagcagctgccgaaactccggcgcagcgcctaggacgcccaatagcgagctttcgatctcgcttccgccatggtgtgcgaaatattggccgttatgtttgtcggcatcggtccggatctgttcctgtaattcagagagttgctgaggggtaagaaagttggcaacgcagcaactacccttggtggtcatttcatgtgcaattaatttatatgaatcaatatcgattctgcgaaacgatgtattcacgatgagctccgcgagattgttcgtcgaataaacagtgcagcgagctgataagccatgacgcagcgaaacatgttgcgtgatttttaatggcttagttattgctggagaatggttgtttttaaaggcgatagttcaaaaaggttccatgggcgcaacaacttttcattgcgcaaagctaccgccaatggcggttatagccgcccatttttttgtcgccccaagacacgcctggcccctcgaatgccagtgctggcgaacctttcagacatggctaccgcactcggctaaatctcgagaggagcaaaaaaagcaatttctagtgcataacagcgctgggctgtaaggggaagccatccctgtgcactgacggctgcaatacgggtaaaaccagcttgcggctcgggaaacatcctgtctcatgggtgtgacgtagttatcattcagaagctgtttacagtcaagatgaggcgaaaaaaattttatataggggcagggccgtttttcgtaatcccttgatgggcaaggaattaaaaaatcgttctgtttcaaggtttttaaagcgcgctatgaactatccatcgttggcattaaaccgaacgattgagtggggcgcgttagttgattagtcaattaaggtatttgtggcgtcaggaaggcggacgatgccgaaaagagcgcaagggaaagcagccgcgtgggcgagcagggaagggactacgtaaatggcggaacgaaaaaaggccactcgagagagtggcctttttcgtatttggttgcgggagccggatttgaaccgacgaccttcgggttatgagcccgacgagctaccagactgctccatcccgcgtctgtggggcggcattctacaggctgaaggcctgatgtcaaccgtaggctgaaaagaaagcttttttattcaagtggttagccgtttcgctcaagcgtccgggccgctcagtatgcccgccagtgggcgcgcctgaacgaaaaaaggccactccagagagtggcctttttcgtatttggttgcgggagccggatttgaaccgacgaccttcgggttatgagcccgacgagctaccagactgctccatcccgcgtctgtggggcggcattctacagctttcggtggcgctgtcacggctttattgggtgacggcgcgatttattccagtgcgtaacgaaaccttggcgccggtttcctctgtcacgttgccgatacgctggcttcgcggcgcgtccgttccggctttgtggtgatagcgagtgactcgcaacattccccagagcatggccaatgcagcggcgctccagcccacgatcatcaagaggattaccacagcgggtgcaatcattgttggattcctttctaacctgacaactgctctctaatgaatcggacccgggttcggaacgacggttccgctcgccgttggtcggtcgcgctgggcggcagcgcacggtgcccccgtccaattgcctaaagagtgaccgcaatgctgtaaggaggcctcatgcgtaaatctttgctgatagtgcttggctcgctggccgggttcgtcgcgacgatcgacgccgccgacgcatcgcctgccgcggcgcctgatcctcaacggttggcacagaacaccggtgcggccgaccgctcgctgggtaatggctccatgggcattggtgaaggaatcgagcggttacccgagcgtcgtgaagcggagcgcgagagttacggcgatccacatgcgcccaacgcctatgacgaagcggaccacggcgacacccaccctgacatggagcaccgcccccgccgaacgctgggagagcggcgcgacgactgacccatcgccagaggaatcacgacatgatgagcaagatactgctgatgagcgccggcctgatgtgcatatccggcctggcattagctgagaccgaccacgacctgtccgccccatcgaccaccggtaccgaagccatggagcagccgtcatcgcagatcgatgatgcaggcccggacaggcaggacggcgacgaggctgtagatgacgacgactcgtccgggctggggaccatgggcgctggggcgaggggaaccacgggcggaatgggcgcgaccaccggcaccgacacgctcgaagatcgcgacgccgaaacagagcagtagccgccgagtgacgagacggggccgttccttcggctcatccagctccgtacaatgcgctccttttgcgagttgggccgttttcgatgcagattgccttggcgccgatggaagggctggtcgatgagattcttcgtgatgtgctgaccggcgtaggcggcatcgactggtgcgtgaccgaattcattcgcgtgtcggatcgtctgctgccgccgtccagcttccgcaagctggcgcccgagctcgacagcgccgccagaactcgggccggcacgccgttgcgggtgcagctgttgggctccgatccgctttgcctggccgataacgccgcctttgcctgttccctcggggcgcctgccatcgacctcaacttcggttgtccagccaagaccgtgaacaagtctcgaggtggtgcggtgctgctcaaggagcccgagctgttgcacagcatcctgcgcgaagtgcgcaaggcggtaccggcgcatatcccggtcaccgccaaaatgcgactgggtttcgacagccccgatggagccctggactgcgcgcgggcgctggtcgagggtggcgccgagcaactcgtggtgcatgcccggaccaaggtggatggctacaagccgccggcgcactgggaatgggtcgccaaggttcaggatgtggttgccgtaccggtgttcgcgaacggcgatatctggtcgctcgacgattggcgccgatgccgcgaagtcagcggggtcgaggacatcatgctgggccgtggcctggtatgtcggcctgatctggcccgtcagatcagcgcggcgaagcagggcgtggcgatcgagccgatgtcctgggacgatctacagccgctactggcgagcttctggaagcaggcgcgttgcaagatgtcccctcgatatgcgcccggtcgcctcaagcagtggctttcgatgctcacccgcagctatccgcaagccgtctcgctgttcgctcagttacgccgggaagacgactgcgcgcggctggacgccttgctgggcgtcgacagcgagacgatagcgttcgaggcggccatctagcgaccgccactcacgtccagtaatgcgccgctggtatagctggctttggcgctggcgagccagagaatggcctgggcgacttcttccgcttcgccaccgcggcccatgggtacgctggccttgacgcgctcgacgcgtcctggctcgccaccactggcatgtatttcggtgcggatcacgcccggtcgcacggcgttgacacggataccctcggctgccacttccttggcgagccccagggtcatgctgtctatggcgcctttggccgccgcatagtcgatgtactcgttcggcgcaccgagtttggctgctatcgacgagacgttgatgatggcgccgccgttaccaccgtgacgggtcgacatgcgcctcaccgcctcgcgggcgcagagaaagcttccggtgacattgacggcgaacacgcgcgcgagccgcgccgcatccatgtcttccaggcgcatctggcgttccagcatgccggcattgttgaccagcacatcgagccgtccgaattcggcgtcgattgccgcgaagagcgccgcaacctgctcttcgtccgccacgtcggcggcaaccgcgatggcccgggctccgctgcgctgaagctcatcgagcaactgctgcgcggcgtcctgccgatgatggtagttcaggcagagggcgtagccttcggccgccgcgagcctcgccgtggcggcgccgatgcctcggctggcaccggtgattaacatgactccggacatgaaaaatctccgacgaacggtcttgaaatggatcggccaatacctatctagggcgatacaggatgccgaattcgggtcctgtggtaaccactcgctgaatctcaggagatagcaaaatgaccagtttttcgatggctccactgtttcgccaatccattggcttcgatcgtttcaacgatctgttcgagtcggccttgcgcaatgaagcgggcagctcgtttccgccctacaacgtggaaaagcatggcgatgatcagtaccgcatcatcgtagcagctgccggtttccaagagtccgacctggacctgcaagtcgagcgtggcgtgctgaccatcagcggcggcaagcgcgagaacgcgagcgataacgtcacctacctgcatcagggtatcgcccaacgagcattcaagctctcgttccgcctcgctgaccatatagaggtcaaaggcgctgcgctcaacaacggcctgctggcgatcgagctcgagcgcgtcgtgcccgaggaagccaagcccaagcgcatcccgatcaacggcgagcgtctggcgctggaagaggcctgacccacgggcgcctgaggcgctccgttgactgacgacgaaccccgccgcccggcggggtttcttttttcagatgccgatcagcggcgtgacaagtgggcttccagcaactggcagaaggccgccaggcgtagcggctggctgaacagatagccctgatacaggtggcatccctgaagttgcagcagatcgagctgagcctgttgctcgacgccttcggcaatgacttccaggcccaggcttcgcgccatcgcgatgatcgcgcggatgatctccgcgtcgttcgaatcctccagggcatcgcgcacgaaggattgatcgatcttcaacaggttcaccggcagacgcttcaggtaggtcagtgaggagtagcccgtgccgaagtcatccatggcgaagctcacgccgtgccggcagaggcggcgcattttggcgatggtgtcgtcgaggttctggatcacgatgccttcggtgatctccagcttgatcatctcgtgcggcaggtcggtggccttgagcgtcgcgaggatgcgctcgacgaactcactctggcgaaactggcgggggctgatattgacgcacaggctgaagctgtcggcgttcaccaggcggttggccagcaacgcagcaccgatccggcaggcctcttttatgacccagtcgccgacctcgacgatcaggccgctttcctccagcacatcgatgaactgggccggtgaccgggtgccatgttccggatgatgccagcgaagcagaacttcagcgccgatcaccgcaccggagcgcgcattgacctgcggttgcagctctagctcgaattcgttgcgctgcagcgccagacgcagctcgctttccagcttcaggcgcgcactggcggcctcctgcatggtggtacggaagagctggatggcgttgcgcccggcatccttggccctgtaaagggcgatatcggcgcgcttcagcaggtcggccggcgtttcaccgtgatccggcatcaacgcgatgccgatgctcggcgtgacctgcagccggttcccctcgaagaccatcggttcggcaagcagggttcgcagcttttcggcgaactggcgaacatgccgggtgacctccgagcgcctgccggtcaggccggtcaacagcactacgaattcgtcaccgccaaggcgggcgacggtgtcttcctggcgaatactggcttccaggcgcgcggtgatcatcttcagaacagcatcgccgaccgggtgcccaagcgaatcgttgatgtgcttgaagtgatcgagatcgagaaagagcagggcgccgcgcatgttgtgccgcttgtgcagcgacgcttgctggttcaggcgttccatcaacagcgtgcggttgggcaggttggtcagcggatcatggtaggcaagatgctggatttgcgcacgagcggccttcaggcggctgatgtcgcgggcggacagcaacaggcagtcggtgccgttgagctcgatcggctcgacagatacttcgatatgcctgggcttgccgtggcggtcctggccgaccatttcccaattggtcacgcggccgtcgcgctccagcctctcgaggagttcctgtcgttgtgcccctggccagagtttcagttccgcagaggttcgaccgatggcctcctccgagcgatagccggtcaggcggtagaagccttcattggcttcgatgaagcggccggtgcggcgttcgctgatgatgatggcgtcagggctggagtggaaagcagtggcgaatttggtctcgctcaccttcagcgcggcttcggcctgctggcgcttggttatgtctcggaaggtggtgacgatgcacagccgccgatcgatccggatgaagcggctggagaccacgcacgtgacgtgctggccgctcttggtgcgaaattgcgcctctgcgttttccagatgctgatcgcgcgacatctgttggtaaagcgattggcgctgcgcttcgtcgcgccagataccgatttccggagccgagcgcccgatgatctcgtggctctgccaaccgaatacggcgctgaagctggggttgatatcgatgaacacgccgtcgcggatgcgcgaaagcgagatagggtcggggctgccctggaacaacgcggagaatttggcttcggaggcggcgaggtgttgctcgcgcagcaccctttcggtggcatcgatgatgatccccgccatccgcagcggctcgccgtgagcgtcccgatacagcttggcggtgctttccaggtgccgcgccgtgccgtttggatgttgcgcctgataggtcgtctggtaggtctggtgccgcccggcaagcaggtcgctgtacgcctcgcgcatggtctggcggttgttcggcgcgacgctacggaagaactcacgaaacgatccgtcgaacgggccttcgacaattccgtgcagttccgatgcccgggtcgacgcgtaaagccggtcgctggggatgtgccactcccagtagcccagctccgccgaggcgagcgccagctcgagacgttcctggctgtcttccagtgcctgggcctggatatgctgttcggtgatgtcgcgcacggtaccgaccaggaccgccggttccgtttcggcggcctggggcaggccctctatttccagccagcgtacgctggcgtccggtaggcgcacccggtggcggatacgcaggcgcgtgtttttgcccgcacgcaccgagcgcgcaatggcctcgacatcggcgcgatcgtcctcgacgaccagcgccaggtagtgttccagggatatttcagcaagagactcatcgagccccaacaggcggccggtgccggtagagccgtgcatgacgccccgctgaagatcccaggaccagatgccgaatcccgcatcgctgagcatcgacagcagtcgcgtggcgtctcgccagggtttggccgcttcgcttgcgccaacatcgttcacggactcaggaggcagcatgaacggcctcgatcgggtggagccagacgtcgcgcttcggtcgacaggcgatgctcatgggattcccagaaccttatagttgtgcggcgaacttatccgtagctaatggcaaagtgcaagtgcggttagtcggcttccagtagcgccatgaacgccttcgccgcattggacagggtgcgctcggtgtgggtgatgtaaccgagctgccgcgacagctgaacccccggcacgggcagacgcaccacctggtcatcgagcatcgtgcgtggcagcacgctccaggcgatgccgatggacaccatcatcttgatcgtctccatgtagttggtgctcatcgcgatgttcggcacgaggccctcgcgctcgaacagccgctgggcgatatggtgggtaaaggtattgccgcccggaaacaccgcgggatagtgggcaatgtctgccaggctggcttcgggcattcttgccagcggatgttcgggcgccaccacgaagtcgagcggatcatcccagaccttgcatgctcgaaccggcgcggccgtttgcggcgcgagcgtgatcacggccagctccgcgcgcccgtgcagcacttcgtcgtaggcgatttccgaatcgagaaagcgaatgtccaggttgacctggggataggcgcgggtgaacgcacgcaacaagggtggcagacggtgcaggccgatgtggtggctggtcgccagagataaccgaccgctgacgtcgccgttgagattggtcaacgcccggcgggtatcgtccagtacattgagaatctggtaggcgcgcggaagcagcgctctaccggcctcggtcaggccgatctcgcgtcccagtcgatcgaacaaccgtacgttcagttgcgactccagcgcggccaggcgtttgctcaccgccggctgggtcagatgcaggcgttctgctgccaacgagaagcttcccgtctcggcaatggctatgaaggcgttgagggcggcaaggtccatcggactgctccggcgtgagtcaagaaaagctcgttgcgtgcagcttatgttattcctgcgtggaatgctttggatgaaaaatatgaatttgagtaattcgaccgcgcgccatagcattcaccccataagcaaaagggctatagcccgacgtactgatgaggaaagtccgatggccggcaaaacgctctacgacaagctctgggagatgcacgaggttaaacgtcgcgatgatggctcgtcgctgatctatatcgatcgccacattctccacgaagtgacctcgccgcaggcgttcgaggggttgcgtctggctggtcgcaagccttggcgtatcgacgccaacatcgccacgccggatcacaacgtgccgaccaccaagggcgaacgccagggcggtctggaagccatcgccgacgaggtatcgcgcatccaggtgcagaccctcgacgagaactgcgatgacttcggcattctcgaattcaagatgaacgacatccgtcagggcatcgttcatgtgatcggcccggagcagggcgcaaccttgcccggcatgacggtggtctgcggtgactcgcacacctcgacgcacggcgctttcggcgcgctggcgcacggcatcggcacctcggaggtcgagcatgtgctggccacccagtgcctggtggcgaagaagatgaagaacatgcaggtccgggtcgagggcaagctgcccttcggcgtgaccgccaaggacatcgtcctcgccgtgatcggcaagatcggcaccgcgggcggcaacggccatgcgctggaatttgccggcagcgccattcgcgatctgtccatggaaggccgcatgaccatctgcaacatgtccatcgaggccggtgcgcgcgtgggtatggtcgcggtcgacgagaagaccatcgcttatgtcgaagggcggccgtacgcgcccaaggatgccgactgggagcgcgccgtcgccgcctggaaagacctggtctccgatgccgatgcggtgttcgataccgtggtcgagctgaaggctgaagatattaagccgcaggtcagctggggcacttcgccggagatggtgctggccgtcgaccagaacgtgccggatccggctgccgaagccgatccggtcaagcgcgactcgatcactcgggcgctcaaatacatgggcctgcgggccaaccagccgatcaccgagattcagctcgaccgcgtgttcattggttcgtgcaccaactcgcgcatcgaagatttgcgcgccgcagccgaggtggcgaaagggcgcaaggtggcggctaccgtcaagcaggcgatggtcgtgccgggctcgggcctggtgaagcagcaggccgaagcggaagggctggacaaggtcttcctcgaagccggtttcgaatggcgcgagccgggctgctccatgtgcctggcgatgaacccggacaagctgggcagtggcgaacactgcgcgtccacgtccaaccgcaatttcgaaggccggcagggtgccggcggccggacgcatctggtcagcccggcgatggccgcggcggccgccgtgaccggtcgtttcgtcgatgtacgtgaattgatccaggcctgaggagaccgacatgaagccatttacccagcacaccggtctcgtcgcgccgctcgatcgggcgaacgtggacaccgaccagatcattcccaagcaattcctgaagtcgatcaagcgcaccggattcggtcccaacctcttcgatgagtggcgctatctcgatgtgggtcagcccaaccaggattgctcgacccggccgctgaacaaggagttcgtgctcaacttcccgcgttatcagggcgcgagcgtgctgctggcgcgcgaaaacttcggttgcggctcgtcccgtgagcatgcgccctgggcactcgaggaatacggtttccgggccatcatcgcgccgagcttcgccgatatcttctacaacaacagcttcaagaacggcttgctgccgatcgtgctgaaggaagaggaagtggatgcgctgttcgagcaagcagaggccaccgagggctatcagctcaccgtggacctggcggcgcagacggtaacgcgcccggatggcgtgcagtacagcttcgaggtcgacgcgtttcgcaagcactgcctgctcaacgggctggacgatattggcttgaccctgcaggacgcggaggcgatcaaggccttcgaaaagggccatcaacagcgtcagccatggctgttcggtgccatccgttaaccagttgctgatcgctcgccaaccaaggagtctcgcgtgaacgataacgctcatagccaggtggtacaaaagcagttcggggagcaggccaacgcctacctgagcagtgcggtgcatgcgcaaggtcccgagttcggcgagctgctggctgcggtggagggccgccgcgacgcgcagttgctcgacctggggtgcggtgccgggcatgtgtccttccacctggccccggcagtggccaaggtgatcgcgtacgacctgtcccagcagatgctcgatgtggtcgcgcatgcagcgcaggcgcgagggctggacaatatcgagacggtgcatggtgcggccgagcaactgccgttcgaggacggccgtttcgatttcgtcgtcagtcgttactctgcccaccactggagcgatctcggccaggcgttgcgcgaggtgcgacgggtgctcaagccgggcggcgtggcggccttcgtcgatgtcgtcgcgcccggcttgccgctgcacgacacccatttgcaggccgtcgagctgctgcgcgacaacagtcatgttcgtgactactcgccggccgagtgggctcgtcagctgggtgaggccgggctgcaggtcacctccggcaagctacagcgcttgcgactcgactaccggtcctgggtcgagaggatgcggacgcccgaggtgttccgcgccgctattcgccagttgcagcgcgaggccagccaagaggtccgcgcctattttgaaattgccgacgacggctcgttcagcaccgacgtgttgctggtctgggccgggcgttgatcccaacctggcgttcatgcgcctaacgagagagcacgatgagcaaacagattctgattcttcccggtgatggcatcggtccagaaatcatggccgaagcggtcaaggtgctgcagctcgccaatgacaagtttcagctcgacttgcagctgagctacgacgagttgggcggggcggcgatcgacaagtacggcgtgcccctggccgacgagacgctggagcgtgcgcgcgcagccgatgccattctgcttggcgccgtcggcggtccgaagtgggacaccatcgaccccgctatccgtccggagcgggggctgctgaaaatccgctcgcagctcggcctgtttggcaatctgcgcccggcgctgctgtacccgcagctggccgaagcctccagcctgaagcctgaaatcgttgccgggctggacattcttatcgtccgtgaactgaccggcggtatctatttcggtcagccgcgcgagagcaaggtgctggaaaacggcgagcgcatggccttcgataccctgccttacagcgagagcgagatccgccggatcgccagggtcggtttcgacatggcccgcgtgcgtggcaagaagctctgctcggtggacaaggccaacgtcctggcgtccagccagctgtggcgcgccgtggtggaagaggttgcgaaggattacccggatgtcgaactcagccatatgtacgtcgacaacgcggcgatgcagctggtgcgcgcgccgaagcagttcgacgtgatcgtgaccgacaacatgttcggcgacatcctgtcggacgaagcttccatgctgaccggctcgatcggcatgctgccgtctgcttcactcgattcgaacaacaagggcatgtacgagccctgccatggctcggcaccggatatcgcaggccagggcatcgccaacccattggcaaccattctttcggtttcgatgatgctgcgttacagcttcaatcaggtcgccgctgcggacgccatcgagcaggccgtcagcaatgtgctcgacgaggggctgcgtacaggcgatatctggtccgacggctgcaagaaggccaatactcaggcaatgggtgacgcagtagtcgcggcgctcgcgaagttgtaatctctcgggtcccattgcaccggccgttgacagagcttgcgggcgacggctaggcggaagacgccgagtgatggcgaggcgttgcggtgccacggcacggcgcgccctcgctttcgaacccgaaagcgtattttgttatcgacggcctgccaggcgggccatacatatatataggtagttgcgatgaaacgtgtaggtctgatcggttggcgcggtatggtcggttccgtgctcatgcagcgaatgctggaagagcgggatttcgacctcatcgagccagtgttcttcaccacctccaacgtaggcggtcagggcccctcgatcggcaaggacattgccccgctcaaggatgcctatagcatcgatgagctgaagtcgctcgatgtgatcctcacctgtcagggcggtgactacactagcgaagttttcccgaagctgcgcgaggccggctggaaaggctactggatcgatgccgcatcgacgctgcgcatgcatgacgacgccgtcatcgtgctcgatccggtcaaccgcaaggtgatcgaccatcaactggacgccggcacgctcaactatatcggcggtaactgcacggtcagcctgatgctgatggggcttggcggcctgttcgagcacggcctggtcgactggatgagcgccatgacctatcaggcggcctccggcgctggcgcgcagaacatgcgcgaactcatcaagcagatgggcagcatcaacgcatcggtcgccgatgagctcgccgatccggccagcgctatcctcgaaatcgatcgcaaggtcgccgagtgccagcgctccgaggccttcccggtcgataatttcggcgtgccgctggccggcagtctgattccctacatcgataaggagctgccgaacggccagagccgcgaggagtggaaggctcaggcggaaactaacaagatcctgggccgcttcaagagcccgattccggtggacggcatatgcgtacgtgtcggcgcgatgcgctgccatagccaggctctgaccatcaagctgaacaaggatgtgccgatttcggacatcgaaggcatgatcagccagcacaacccttgggttaagctcgtgccgaaccatcgtgatgctagcatgcaggaactgagtcccacctcggtgaccggtaccttgagcgttccggtgggacgtctgcgcaagttgaacatggggtcgcattatctcggcgcatttaccgtcggcgaccaactgctctggggcgccgccgagccgctgcgccgcatgctgcgcatcctgctcgaacgatgaacgcgtagaaggcagacaaaagcgcctcggcatcgccgcggcgctttttttatgcatgaacctcatgtgagtcgacgcgagcgacaggctgcgtcgctcgtccacgcgtttcgtcgggtcaagacttaattgctcggtgccaaaaggggtttcggctagagtgcgcctctcggtcgaggcgttcgggtggcggggcgaatcccgcttgcagggacctcgtgctgtcagtcgagcagtgccgacctaatttgtggattgtgtctgataacttgccaaaaggcgcgaacggctacggcgtgcggtctggtgggttgttgataaaacactatctgtaaaagatacttactgggaaattagaagaactattctagctacgatgctgtttaggcttaatcgctgacgggggaccgccacacggcgggcgcaggcagtgactataagaccctctcgaagatccgagaaaagttaaaacaagggatttacataatggttcgggttcgcaatctggtgctggcaatcgcggctgctaccgcgctgacgtccgaaatggcttatgcgctggggctgggagaggtcacgttaaagtctgcgttgaatcaaccgctggtagctgaaatcgaacttctggatgctaaatcactggccccgggcgaagtcgtgccggtgctggcatccgcagaggatttcaatcgggcaggtgtcgatcgccaatactttctgacggaccttacctttacccccgttctgcgccctgacggcaaaagcgtcatacgggtgtcgtcgaccaagccggttcgcgagccctacctgaacttcctcatcgaggtgatctggccgagcggccggctcctgcgcgaatacaccctgctgctcgatccgccgctctattctcctgaaattgccgccgcggtcgcaccgcagttaccgattgcggcacccatatctcgtccggccgccccgcgagcgacgccgccagctgtgcagtcgccttccggcggttccagtcagcagggcgagcaatacaaggtcacgccgaacgatacgctctgggagatcgccgagcgcgcacggcagggcggcaccgtgcatcagaccatgctggccattcaggatctgaacccgaacgccttcattggcggcaacatcaatcgaatgaagaatggccaggtgttgcgcctgccaaatgccgagcaaattggccgtcgctcccaggccgaggccatccagcaggtggcgcagcaaaatgccagctggcggcaggcaacgggcgctgcgccggccggtactcgtcaactcgacgctacgcagcgcggctcggctggcgcggcgccaacccgtagcgagcagggcgatagtctacgcctggttgcgccggaaaccggcaagtccaccgccggtagcgaggcaggtgtcgcagacgagtctcgagcgctgcgtgacaagctcgcgctcaccgaggagagcctcgactccagccgccgtgaaaatctggatctcaaggatcgcctcaacgatttgcaaagccagctggacaagctgcagcgcctgatgcagctcaaggatgaccagcttgccaagttgcaggctcagttggcgactggtgcggagtcggatacaggcgcagcggcgccttccggttcggttgaagacagcgttgatgaagcggccgcgacgccgagcacgaacgaggcggcatccgagccagtggccaagcctgaagctgcagccgacgctcctgcagcgcagaagcccgcagaaccggcagagaagcctgttgcgaaggcgccagcagctccggcgccggcagttcccgcggcgcctgctcagtcggaacccgatagttacatcgatgagctgctaggcaatcctgttctgctcggtgtgctgggtggcagtgctctgctgcttctgctggtcggattgatggcactgtctcgccgcaacgcgatgaaggaggctgagctgcaggagagcctgctcgccgatgagtctccagacaccttctacgtggcacagcaggactcttcgcaggtcgagccgctcgatcagggggctgcgccggttgcggaacagactgctgatccgcttgctggcgtgagcagcgatccattggcggaagccgacatctacatcgcctacggacgcttcaaccaggctgcggatctgctgcagaacgccttgaatgacgagccgcagcgcagcgatctgcggttgaagctcatggaagtctatgccgaactcggtgatcgtgacggcttcgctcgtcaggaagccgagcttcgggaaatcggcggatccgcggcggcgatcgagcagatcaaggctcgctaccctgcaatcgcagctgcggcaggtgccggcttcgtggccaccgcgtcggcgggtaacgatgacttcgatagtctcaacctggacgacctggagctcgacgagcctgccgctgccaacgcggaagccgctgagaactccttcgatctgaacctggacgacctggaactggacgatgggctgacagacaatgcgctcgcgccgaccgacgacagcacctcagggttggagccgttcaatttcgacgagctcaatctggaagccgcttctcaggagcagaccgagaatgacttctcgttcgatctggacgagcccaaggcggatcaggcgtcgttggaagacgagctggccggcttctcgctcgacctggatgatgagcctaccgttgcactcgatgaggaatctgcctcaagcctgaaccagccgcctgtttcggaaacctccgagcagaccgacgatttcgatttcggcttgtccgagcccgcgcaactggcggacatgccggacgagttcgatctgtcgctggatgacgaagttggcgagcctgctcgtccggacgctttctcgtccgagctggaagaggtcgaggccgagcttgacgatctgtcccgcgatttggccgagccgctggatcagccgacggtggccgacgctggggaggagcccgtagcgccagtatccgacgcgctcgatgaggacttcgatttcttcgccgatacggatgagaccaccacgaagttggatctcgcccgtgcctacatcgacatgggggacgccgaaggcgctcgcgatattctcgatgaggtgatgagcgaggggagcgacagccaacagcaggaggcgcgcgatatgctcgctaagctcgcctgaccatgactgaagcagtacctgaagcggcagcctcctcggctgccgttgacgttttcagaattgcactcggggtcgagtacaagggctctcgttaccgtggattccagcgccagcgcgacggcgtaccgtctatacagctctcgttggaaaacgcactgagcaaggttgcgggcgggcacccggtagtcctgagctgtgctgggcgcaccgatgcacttgttcatgcctgtgcgcaggttgtgcatttcgatacgccagtcacgcgctccatgcatgcctgggtcatgggtgccaacatgaacttgccggctgacataagcgtgacctgggcgaaggaaatgcccaggaccttcgatgcacgtttcagcgccatggctcgccgttatcgttacgtgatctataacgaccagatccgcccggcccacctcgccgaggaggtcacctggaatcaccgtccgctggatatctcgcgtatgcgcgaggcggccaaggcgttcgttggaacccatgatttcagcgccttcagggcacgtcagtgccaggcgaaatcgccgatcaagaccatccatcatttcgagctgctcgaacacggccggctcatcgtgatcgacgttcgcgccaacgcctttctgcatcatatggtgcgtaattttgctggtgtgctgatgaccataggcgcgggagaacggcccgtggaatgggcgcgagaggtattggagtcgcgcgtgaggcggaccggtggcgtgacggcgcacccctatgggctgtatctcgttcaggtcgattaccccgagcagttccagttgcccgaacgttatctcggaccccatttcctgtccggtctgccggacgtccggtgttcctgatccagagctgcggatttgacggccgtagcggtgcagtaccgcagcggtcgtctttgccgacatgccacgcgatgcaggttgcagctgcccgcgcttttgttaccatccggggtcttctgtcgcaggtgcctgccgttgcctatcgttcgtagcaagatttgtggaatcacgcgggtcgaggacgcgcttattgcggccgaagccggggcggacgcgatcggcctggtgttctacggcaaaagtccgcgggccgtgagcgttcagcaagcccgcgccatcgtcgctgccttgccgccattcgtcacgacggttggtctgttcgtcaacgcgtcgcgctgcgaactcaacgaaatactcgatgccgtaccgctggatgcgcttcagtttcatggcgacgagcagcccgccgattgcgaggggttccatcgccgctggtacaaggccttgcgagtcaaggcgggggacgatattcgcgcccaggccgctcgctatgccggggccagcgccattctgctcgataccttcgttgctggcgttcccggagggacgggcgaggtattcgactggtcgttgattcccgcagacctccccaaaccactcattctcgcgggaggcttgacgccggggaacgttcggcaggcaatcgccgaggttcggcctttcgccgtggatgtaagcgggggtgtcgagctgagcaagggcatcaaggacgccgcgagtgtgcatgaattcgttcggcaggtaagagcagcgatgtgacgaaccgagggtcattgccgtccagttaccattcgctggattggcgtacccgccattgatgcccgtccgttacctgacggttgggcacgtttcagcgacagcccagatgggccagcgcctacgcgatgcagtgagctccgactggagaccggtcgcaacgatgaatttgccggtgcgtgcagtcgctacgcgcaggactgacaagctgtggagaataaaagcatgagcaactggctggtagacaagctgatcccctcgatcatgcgctcggaaacgcagaagagctccgtgcccgaaggcctatggcacaaatgcccgtcctgcgaggcggtcctgtatcgcccggaactggaaaagacgctggatgtgtgcccgaagtgccagcatcacatgcgtatcgatgcgcgtacgcgtctggatatcttcctcgacaaggacgggcgtgaagagattggagctgatctcgagcctgtcgaccgactgaaatttcgtgacagcaagaaatacaaggatcgtctctcggctgcgcagaagcagaccggtgagaaggatgcacttatcgccatgcgcgggaccctgatgcaatcgccggtggtggcctgtgcgttcgagttttccttcatgggtggctcgatgggcgcgatcgtaggcgagcgtttcgtccgtgcggccaatgtcgcgcttgagcagcgctgcccgctggtctgcttcgcggcatcgggtggtgcgcggatgcaggaggcgctgatctcgctgatgcagatggccaagacctccgccgtgctggcccgtatgcgcgaagagggtttgcccttcatttcggtgctgaccgatccggtctacgggggcgtatcggcgagtctggccatgctgggtgacgtcatcgtggctgagccaaaggcactgattggcttcgcaggcccacgcgtgatcgagcagacggtgcgcgaaaagctcccggaagggttccagcgcagcgaatttctgctcgatcacggcgccatcgatctgatcgttccgcgttccgagttgcgtgcccggctggcgcggcttctcgctcaactgcaacaccgaccgaccccggccgagccggcacgggtaacggctagcgcatgaccgtgcggagcctgcaggattggctcgaatacctcgagcaactgcacccgaccgcaatcgacatggggctcgaccgctgccgtgaggtagcggcgaggctcgggcttacgcgcccggcgcctcaggtcgtgacggttaccgggaccaacggcaagggatcgacttgcgcgtttgtcgccgaactgctgatcggccagggcaaaacggtgggcgtgtacagctcaccgcatctgttgcgctacaacgagcgcgtacggatcaacggcgtcgatgccagtgatgacgcgttgtgcgaagccttcgaggcggtagagcgtgcccgaggctcgatcaccctgacgtacttcgaaatgggaaccttggctgccttctggctcttcgagcgagaggggctggacgccgtggtgctggaagtcggcctgggtgggcgcctcgatgcggtgaacctgatcgatgctgacgtggcggtggtcaccaacatcggtctcgaccatgcggagtggctcggcaccacgcgtgagagcgtggcattcgaaaaggctggcatctttcgctctgcaacacctgccgtatgcggcgatcccgagccgcccgagtcaatgctggccagtgctgctcagagcgctgtgccgttgctcgtgcggggccgcgatttcgatctggagcgcagcacggacagttggcactggcgaggcaaggaccgttccggtgggccgctggagttgcgcgatctgccgatgctcaccttgccgttggagaacgcggcggtggcgttgcaggcgttcgcattgatcgaaccgttcggagaaccggagcgcctgattgaggcgctcaggcgcactcgcgtcaccgggcgactggatagccgaacgattcgctggcgaggtcgcgagctgccgatattgctcgatgtcgggcacaacccgcatgcggcggcctaccttgctcgacatctacagagggcgcctggctccgggcggcgcctcgctgttttcggcctgttggctgacaaagacttgcctggtgtgatcgacgagctgctgcctgtcctcgatgcctgggcggttgcgccgctacgcagtccacgttcgcgtgatgccgtcgatttgagttcggcattgaaggaacgcggcgcggcggtcactatctacccggacatcgcgcaggcgctcgaggggcagtgcaatcaggcggccgagggcgaccagattgtactgtttggatctttttattgcgtagccgaagcgctggcctggctggaccggtacgcatcgagtggagggcaggttcttggtggataaaggattgctgcagcgtatcgtcggtgcgctagtgctcgttgcgctggcggtgatttttgttcctatgctgttcaaccgtgaggatgccggtcggcaggtcaccgtggatgcgccgccgatgccggagcccccggctacgccggtgatcgagacgcagcctgtcgaagtgcccgagccagacgtggagccgttccctgaagagtatgaaatcgtcgaggagggtcgggtagccgagcccagtgcgcctgccgagcccagcccggctccggccaagcccgagtcggctccggcagcgtccgagccggcgcctgctgaggcggtgcagccagcgccaccagcggcgacggctgcgcctgaggagaagcatctggacgcggcaaacctgccggtcagttggtcggtgcagctcgccagcctgtctagccgcgagaacgccgacaagcttcagaaaaccttacgctctcagggctataacgcctacatacgcaccgcggacgggatgaatcgcgtgttcgtcggtccgttggtcgagcgggccgaggccgaccgtctacgtgatcaattgcagcggcagcagaagttgaatggcttcgttgtacgcttcaagccggagcagggctgagcacaggcgcccagatagggcgccagcgttttttccgtgcctgcctagagcttactccggggcgggggctctgctaaaatacgccgcctttctccttagcaggaaaccacgtgacgctcacttgggtcgattgggcgtttatcgccgttgtggtcatttccagtctgatcagtctgaggcgcggcttcgtcaaggaagcgctctcgctgctcacctggatcgttgccggcgttatcgcctggatgttcggcggcgcgttatctcattatcttgctgactacatcagcactccttccttccaggtgatcgcagcgtgcgccatccttttcgtgttgaccctgctggtcggtgcgctgatcaactttctcatcggtgagctggttcgtgtcaccggtttgtccgggacggatcgcttccttggcatggtgttcggggcggctcggggcggattgctggtggtggtgttggtcgggctactcagcctcgcaccggtccagcaggacccttggtggcgtgaatcgacgctgttaccgcattttcttctggttgccgattggtcgaagaacctgattctcgggtttggaagccagtgggtcgccggctcgctcgatgcgtcgggctgacctgagtcttattcaacggccgtgtcggggtctgtaagccagccacgtccggacagtctgtaccaactgagaggttccttgcatgtgtggcatcgtcggcattgtcggtaagtcgaacgtcaaccaggcgttgtatgacgcgcttaccgtattgcaacaccgtgggcaggatgcagccggaatcgtgaccagcgacggcggcaagctgtttctacgcaaggacaacgggttggtccgagacgtctttcagcaacgtcacatgcagcgtctggtcgggaacatggggatcggtcatgtacgttaccccaccgcgggcagctccagttcggcggaggctcagccgttctacgtgaactcaccctacggcatcaccttggcgcataacggcaatctgaccaatgtcgatcagctgaccaaggaaatctacgagtccgatctgcgtcacgtgaacactaactccgattccgaggtgctgctcaacgtgttcgcccacgagttggccgtgcgcggcaagctgcagcccaccgaagaggacgtgttcgccgcggtggccaaggtgcacgagcgttgcgtcggcggctacgcggtggtggccatggtgaccggctacggcatcgtcggcttccgtgatccgcacgcgattcgcccgatcgtcttcggtcagcgccacaccgatcagggcgtcgaatacatgatcgcgtcggaaagcgttgcgctggacgtgctgggcttctcgctgatccgcgacctggcgccgggcgaagcggtctacatcacggccgacggcaagctgcatacgcgccagtgcgcaccgaacccgcactatgcgccctgcattttcgagcatgtctatctggcgcgctccgattccctgatggatggcgtttcggtgtacaaggcgcgcttgcgcatgggtgagaagctggcggacaagattctgcgtgagcgcccggatcacgacatcgatgtcgtgattccgattccggacaccagccgcacggcggcgctggagctggctaaccgcctgggtgtcaagtttcgcgaaggtttcgtcaagaatcgctacatcggccggacgttcatcatgccgggccaggcggcacgcaagaagtccgtgcgccagaagctcaatgccatcgatctggagttccgcggcaagaacgtcatgctggtggacgactccatcgttcgcggtacgacctgcaagcagatcatccagatggcccgcgaagcgggggcgaagaacgtttatttctgttccgccgcgcctgctgtccggtatccgaacgtctatggtatcgacatgcccagcgcgcacgagctcatcgcgcacaaccgtagcaccgaagaggtcgcggaactgatcggtgccgactggctgatctatcaggacctgcctgatctgatcgacgccgttggcggcggtaaggtcaagatcgagaacttcgactgcgcggtgttcgacggcaaatacgtaacgggcgatatcgacgatgcctatctgcacaagatcgagcaggcccgaaacgatgtgagcaagcacaagagcgttgccggcagtgccatcatcgacctgtataacaactaatcgccaaaatccggtggcattgccgcctcgaatcaggtggaaacgactatgacaaccgattgggatgcggggcgactcgacagtgacttgtccggcgcaggcatggacacattggcggttcgtgccggccagcaccgctcgccggagggcgagcacggcgagccactgttcttcacctccagctatgtgttccgcagcgccgccgacgccgcggcgcgtttcgccggcgaagtgcctggcaacgtctattcgcgctacaccaaccctacggtgcgcgccttcgaagagcgcatcgctgccatggaaggtgccgagcaggcggtggcgaccgcctccggcatggctgccattctggcgactgtgatgagcctgtgctcggccggcgatcacgtgctggtgtcgcgtagcgtcttcggtgcaacggtgtcgttgttcgagaagtacctcaaacgcttcgggctcgaagtggactacgtaccgctgacgaacgtggacgactgggtgcccgcgttcaagccaaatacccggctcgtattcgtcgagtcgccctccaaccccttggccgagctggtcgatatcgaggccctggcctcgctctgccatgccaagggcgcgatgctggcagtggacaactgcttctgtacgccggtactgcaacagccgctggcgctcggtgcggacgtggtcatccactcagcaaccaagtacatcgacggtcagggccgctgcctcggcggagtcgtggccggcagagccgagcagatgaaagaggtggtgggcttcctgcgtaccgcaggtccgacgttgagcccgttcaacgcctgggtatttctaaaaggactggaaaccttacggctacgcatgcacgcccattgcgccagtactcaggtactggccgagtggctcgagcagcagccgggcgtcgagaaggtctactatgcgggcttgcccagtcatccgcagcacgaactggccagacgtcaacagcgcggcttcggcgccgtactgagcttcgaggtggcaggcggaaaggacgcggcgtggcgtttcatcgatgcaacccgcctgatatcgattaccgccaacctgggcgacagcaaaaccaccattacccatccggggtcgaccacccacggcaggctttcgccggaggaccgggcgactgccggtatccgcgacagcttgatccgcgttgcggtagggctggaggacgtggcggatctcaaggcggatctggcccgggggttggctgcgctctaagctatctcgcgattgcttccctcgtccgacgaaccccgcgcatcgcggggtttcgtttttcagggcggaacgcttgcaggaaggacgttcgacgcgctaatcggcgacctatgttctgtctcgtatgagcgggtcaatcgttgccggcgactggcggtgagcccggtcgccggcaacggccccgttagtcgcgtccggtttcgaacttgacgacgaacccgtccaggcgctgttcatcggagagttggtcgcgaagctggctggcctcctggcgctcgcgcaccggcccgacgaacacacggtgggttcggcccgtggttctcaggtaggcatcgaagccctcagcctgcaatttcttttgcagtgcggtggcgctttcacggttctgaaagctgcctagctgcacggcccacccggaaagcagcgaggtctgtgctcgaggctgcgccagtggtgtgggcgcctgtggcgcgcgttgagtggcgggtgctttgggcatcgcctgccgctgggccggctcgttggagcgaaggtcgatcgccggtgccggctggccctgcccatcgaacagccgttcgggggtagccggaaggagactcgggctatccgacccggtttcgatgacccggatatcgctgtatttcttccccgaaagggctgccagcccagcgcggtcgcggatgacggtcggtcgcaggaagaccatcaggttacgtttgacgtggctttcctgagtggagcgaaacagcgcccctagcagcgggatgtcccccagcaatggaaccttggagttggtctgggtcacgtcatcctgaatcagaccgcccagcacgatgacctggccatcctcggcaagaatggtgctcttgatggagcgtttgttggtcaccaggtcgactgcctgtgccgacaggctggccgacggcgcgatcgaggagatttcttgctcgatttccaggcgtagcgtggcgccgtcattgatgtgcggcacgaccttgagtgtcaccccgatatcctgtcgctcgatggtggtgaaggggttgttggcaccggacgagtcggtggtatagctgccggtctgaaacgggacgttctgacctaccagtatctccgcttcctggttgtccagcgtcagcaggctgggcgtcgatagcagattgctcttgctgttggcggaaagggctgtgatcaaggcaccgaagctgcgcgtaccgacgccgatgatggcgccatcggggaggtcgctgggaatctcgtcgtcacggatcgcattaagcacgctgcccaccgaaataccggtgttgccgaagctgacgccgccggcaccaccagtgcctcctcgcgcatcgaccgcccactggacgccgagcgcatcggtgatatcgcccgagacctcgacgatggcagcctcgaccatgacctgagcgcgcggaacgtccagctggcgcacaatcgactcgagggtgccgatcagttcgggctcggcgagcatgaccagcgcattaaggctctcgtcggcacgaatcaggatgttctgttgcctgccgccctggacttcgccgtccgccggggctgcaagctgctcggaaatgtcgcccagggtttcggccagggccttggcatcgttatggcgcaggcgaatgacccgtgtgttggccgagcgagtgctcggcgtatcgagcgtgttggcgaggctggcgagtttctgccgagcttgttcgggtccggtgaaaatcagtcgattggtgcgcgagtcggcgatgatctgggcaccggcggtgtccttggcttcgccacgcgaaagggtgttccgtagcacttcggcgatgtccaccgcccagccgtactgcaggttcaccacgctgtagtcgtcgttctgggcgcgatccagctggcgcaccagatcctctatacgggcgatgttggcgctgcgatcgctgatgatcagtgcattggcggaaccgacggctgcgagatggccgtattgcgggatcaaaggcctgatcagcggaatcagctcggtcgctgaggtgtgctggacctggatgacacgagtttccagcaggtcgccaccggtcgggcctccaccggcctccgatttcgcttcggcgttgggcacgatgcgcgccacgtcaccttgcgtaagtacgctatagccatgtgtggccatgaccgacaggaacagttgatagacctcggagagcgacagcgttgtcgacgacaccacgctcacttgccccttgacccgcgggtctacgataaaggtttggccagtcaactggctgatctggtcgatgaacgctcggatgtctgcatccttgaggttgatcgtccagccatcctgctgggtttcactcggctcgatacctgggtcggccgcaaaagagggcagcggagtggcgagcaggccagcggcgagcaaggctatgagcgggcgggaaggaaaaagcggcatcggtcagttgtcttccgtgggttgttcatcggagggcagggcttcgggcgaatcattgactccttccatctgctggcggagcgcttccatctgctgctgaagcatctcggcttgcggatccggctggtcggtagccgccggttcactgtagtccggtagcgtatcgggcatggccgtggcggtgcgagtgcttgggaaatacaggctttcgatacgcccaccccgcgatatttcgacgcggtcgggatggacgctgtacaggcgcacgccttgttccagctcctgttcgacgctgtacagtttgggcggctggccatttatctggatgatagcggtggaccgcgtcgggtcggcatgcacgaagctgccgagcaaagtcaggtcgctgctcgaagtaccgggagcatagaccgggtcgctggtcgtggatgtgccgaacaggcgctccatacgctgcaggtccggcgccacgccggcgggctgatcagcttccacggtatctgtcgcgggcgcctgggtaagttggagccactctcttatctggcccgcaaggtataggccgaacaacaggacgatgagtgcgctgacgatcagaggcgcgcgctgatgaatgttctgcagtgctgcgggggaagccaagctaggcactccgtgaagccagatgatgacgggcattgtcgcaaggccgcgataatgctgttgccgaatgactgcgagcggcagggcgcactggcagcttagacctgaaccatgcaaagaagtacctgagtatgcaagtgcaactgactgttttgccggccaaaggtgcccgatggcaggttattctcatccgtgattgcaagtggccgtcatttttgaagaaataacgcagcgcactgttgacttggtttcagtggatgcgtaaattgcgcgcctcgcaaggcgatcggccggttggttcttcggtcgatactgtttcaattcaggccttgcgagtcgggcgaaagcccggccgacgcgcagcggtagttcagtcggttagaataccggcctgtcacgccgggggtcgcgggttcgagtcccgtccgctgcgccatattcgctccagttcactgaacgactggagcctcgctaaaagcggccttagggccgcttttttcgtttcagcggtccttccaaggcgtttgtccagacgtcggtgtggacggctcgctcatcgcacctttggtcccgttgagccccaaaccaagcggcattcagccgctgtcattgaccgttatcaaccttgcgccttgttcgactgtgacgactggtcacgcctattggagcgcacccttgtgcgttaccgctgtcattatgcgtgatgacatcaatggccaggggcaagcggccgactgacgaggggtttttaatgttcggtttggaagcgctcgagcttgcgcggattcagttcgcgttcaccatctccttccatatcatctttccggcgataacgatcggcttggccagtttcctggctgtgctggaagggctgtggctgaagaccaagcgccaggtctaccgtgacctctatcatttttggttgaagatcttcgccgtcaacttcggtatgggtgtggtctccggcatcgtcatggcctaccagttcggcaccaactggagcgcctacgccgagttcgccggtggcgtgactgggcccttgttggcatacgaggtgctgaccgcgttcttcctcgaggccggattcctcggggtcatgctgttcggctggaaccgtgtcggtgccgggctgcactttttctcaacactgatggttgcggtcggtacgctgatttcgacgttctggatcctcgcctcgaacagctggatgcacaccccccaggggcacgaaatcatcgatggcatcgtggttccggtcgattggctggcgatcatcttcaacccgtcctttccttatcgcctgacgcacatggcaatcgccgcgtttctcgcgaccgcattcatggtcggggcttcggccgcctggcatctgctgcgtggcaatgacaacccggcgatacgcaagatgttttccatggcgatgtggatggcgctgatcgtggcgccgatccaggcggtggtcggtgacttccacggcctgaacacgcttgaacaccaaccggccaagatcgccgcgatggaagggcactgggacaattcgtcgggtgaaccgaccccactgctgatctttggctggcccgacatggagcgggaagaaacgcgctacaagatcgagattccctatctgggcagcctgatcctcaagcacagcctctccgaacagataccggcactcaaggatttccctcgggaagaccggcccaattcgaccatcgtgttctggacgttccgggtcatggtcgcgctgggtatgctgatgatcctcacgggcgtctggagtctctggctacggcgtggtggcagactgttccataccaggccttttctgcgactggcgttgtgcatggggccgtcgggcgtgctcgcgatcctggcggggtggatcaccaccgaagtcggccgccagccctgggtggtctacggcgtcatgcgtacggccgatgcggtgtcgaatcacggtgccgaccagttgggcctgaccctagcgatgttcgtcctgatctatttcgccgtgttcggcatcggcttgctctacgtcctgcggctgatcgccaagggtccgatcatcaacgagggcgatgaaaagggcgctggcgggccgggcgagaaacgtacaccgatgcggccgctgtccgctgccgacgaggcgatcccgcacgaacatggcgaccaactgggcgagaggaattgaatatgggtgtcgatctttcgctgatctgggccatcatcatcatcttcggcatcatgatgtacgtagtgatggacggcttcgatctgggtatcggaattctgtttccgttcctgaacgacagctccgagcgcgacgtggccatgaacaccgtcgcgcccatctgggatggcaacgaaacctggctggtactcggtggggcagggctgttcgccgcgtttccgctggcttactcggtggttctctcggcgctttatctgccgatcatcttcatgttgatggggctgatctttcgcggtgtcgcgttcgagttccgcttcaaagccagtgctgctcgccagcacatatgggacaaggcgttcgttggcggctcgttggcggcgaccttcttccagggtgtcgcgctgggcgccttcattcatggttttccggtggaaggtcgcgcctatgcgggcggcgcgctggactggctcagccccttctcgatcttttgcgggctggctctgatcgttgcctatgccttgctgggctgcacctggttgatcatgaaaacggccggcgagttgcagcagcgcatgcatgacatcggcattcccctggtgtgggcggtattggcggtaaccggcgttgtcagcatctggacacccctgacgcatccggacatcgccgagcgctggttcagcatgccgaatctgatcctgttcatgccggtgcctatcctggtactgctttgcaccttcggtctgctgcgatcgattgcccgctacgcacattattcgcccttcctgttcaccctggcgctgatcttcctggggtacagcgggctcggcatcagcctctggccgaacatcattccgccctcggtcagcatttgggaagccgccgcgccgccacagagccagggctttactctggtcggcgcgctgctgatcatcccgctgatcctcatgtataccgcctggagctactacgtattccgcggcaaggtcagcgctgacgacggttatcactgattcggcttcgccagggagcgcctcatgcagcaaaagcacgaaagtggtgcgtcggagcccaagccactctggaagcgtatgacctggctcgtggtgatctggtcggccagcgtcctcgcgctcggcgtagtcgcgtggctgttgcggcaggtcatgacggccgcgggcctggcgacgccctgaccagcaccccgttcgcgtgcggcgattgggcgcgttgtggctgtcaggggcttgggttattcagtatgcaatggccggtgtgagtgggttcatgtcgctgacatcttcccgcgttaaattgcctggcatgaacattgttagcactgatgcaggtcttacgagccgatcggcgcggttctgccggtaccttcgtttggatcactgcatacccagcaagaggatcgcttatatggatgactatcaagacgaaattctcgaatggcatgcggcggagcaggacggtccagagccggccgaagacgccttcgaactctaggccatcgccacggatgcgttgagccaggccgggattcggtcgctcattctgtgcgacgttgtgctcgccggtaatcgcccggtgtctgtccgctccagcgtttgaatgcgcgctgaaatgcctctggcgacgaaaatccaagcagccaagcgatttcgccgaatgccgcctcggtgtcccggatataggccatcgccaagtcgcgtcgggtgtcgttgagaatacctcgataactcgtgccttcttcttccagcttgcggcgtagcgtccaagtaggcagctgcagccggctggcgatttgttgcaggcttggctcctggcctttgagcattggcccaagcagctgcgtgacccgctcgcgtaggctgcgggttcgagtgcgctgttccagttcggtctcgcagagctccagcagctggcgccaggtgcccgggcagtgttcggggttgcgtagcgcaaggctggccttgtccaaccgcagctggttatgcgcagcggcgaattccacgggtctaccgaacagggcttcgtaccgttcgacgtagatgggttggtcgaactcgacctgcaccgccacgggtgccagcgggcatgccgcaaccgtgctcagctgtgtgatccagctggctaacacggtatccaccacgaacaggttgtagccgttgtacgggctgatcgaatagaagcgcagccaggcgccttcggcgtcttcgtggaaaccggaagcaccgcggtaattggaggcatacaggggttcgtagcggatcagcgcccgcgccgcctcgcgcacggtcggcgcttgcgtcgccgtgatgccgaccaggccgagatggccgggtttgcgcagtcgccccatctccagacccagcccaggatttccggtcagctgaatcgcggcatggccaagccgcatgtaacgcgggatagacaagcgcgcacgtggctcgctgagccgcgccggatccagcccataggcctcgagcaagggctgcgggtcgatctgttgctccagcagggcgctgctcaggctgtgtacgaagccaaccgagaggtcgcccaagcgcacccgttgtcgattcatggccgctccggtaaccagaggttggtcaattgcatcggttggctgcgatgttgttgcgctgggcggtgcggcgagccgaccaggctccagggcaggccgaaggtgtgcacctctatacgcggcagggttggcttcggcgtcacctcgtcggcgcagatggtggccgggtcatcccgtgcgcctgtcaatgcgagcagttcggcgtcggccggaggagtttgggtatgggcatcgcaaccgatcagtacggccagccggccggcgggagtcgccagcgtggccggcggcgtatcacctggcttgctgtaccggcgttcgtaacggctcagcgagaccttgtattgcaaggggccgatgggttcgccgtcggcagcgaagctcaggctgacttgccgaagcgggccattgcctattcgcagctggccgtcctcgaggcgcggctcgggcagcacgacggacccggcgacgagggtgacgccatagcgtttcgccagcccgccgaaaatgtgctgatagtcgtcggccatctgccgccctttgatcttgagtacggcctcggtgcggcggtcgcggccttcgtggcccatcagtgcgcgtaaatagtcccagggattgctcagcgccatccactgcatggcgtcacgaagcgtgcgcgcctgttgaacttcaggcttttcgccaagggcgaacagtccggtgccgacgtgctcggggagcactactatcgtgcgtgggcccagcaggccggcggcctgtgcctggtccagataggttgaaaatttaagctgcaggcgctctctgctctggtagtcggcgggcatcagccgggtctccactgcgagcaggttgccggcggtcccggggcggccctggctgtcgatgggcagcgtgcgtagatcggacagcaatggcccgctgcgccggtcgcccgtccagtccaggtagatgatgaacacggccagggcgagcgccgccaggccgatcagtttgaggtaggtgcgcatgaacgtcagagctgaagagcggtgctggaagactaggcatacgatcggcgaatgccaagcgcttttgcgcgccgggatcaggtacttgtaagtttcgatcattgagactgtcgcggcggctgtttatcttcgctgcacaacgaccacggccccaagcggcgtggcgattctaccgttggctaccggtcaaccacccgtgccgcctgatcgaggaatgaacatgactgcttttccgcaccttctggctccgttggacctgggcttcaccacgttgcgcaatcgcaccttgatgggctcgatgcacacgggcctcgaggagatgcccaacggcttcgagcggatggccgcgtttttcgccgaacgtgcccggggcggtgtcggcctgatcgtcaccggtggggttggaccgaacgaggaaggttgcgtgcgcgcgggagcggccaagctgtcgaccccagaggaagctgaagagcacaaggtggtcacccaggctgtccacgaggcgggcggcaagatctgtatgcagatcctgcacgcggggcgttatgcctacagccctcagctgatcgctccgagcgccatccaggcgccgatcaacccgttcaccccgcgcgagctggacgaagagggcatcgaaaagcagatccgtgacttcgctacctgcgcgagcctggcgcagcaggccggctacgacggcgtcgaaatcatgggttcggaaggttatttcatcaaccagttcctggtcgctcacaccaaccaccgtacggatcgttggggtggcagctacgagaatcgtatgcgtctgcccgtcgagatcgtgcgccgcgtgcgcgaagcggtcggtccgaacttcatcatcatctatcgcttgtcgatgctcgatctgatcgagggcggcagtacctgggacgaagtagtgatgctggccaaggccatcgagcaggccggagccaccttgatcaataccggcataggctggcacgaggcgcgcatcccgactatcgccaccaaggtgccgcgcgcggccttcaccaaggtcaccgccaagctgcgcggtcaggttggcattccgctggtgaccaccaaccgaatcaacacccccgagatagccgagcaggtactggcggaaggcgacgctgatatggtctcgatggcgcggccgttccttgccgatccggatttcgtcaacaaggcggcggctgaccgcagcgataccatcaacacctgcatcggttgcaaccaggcctgcctggaccataccttcagcggcaagctgaccacctgcctggtcaatccgcgcgcttgctacgaaaccgagctcaactacatcccgaccgcagcggtgaagaaaatcgcggtcgtgggtgctggtccggccgggctgtccgcggctacggttgctgccgagcgaggccatcaggtcaccttgttcgactcggccagcgagatcggtggccagttcaatgtcgccaagcgggtgcccggcaaggaagagttctacgaaaccttgcgctatttcggcagcaaactggagagcaccggcgtagatgtacggctgaacacccgtgtcgatgccaaggatctgctggccggcggttacgacgagatcatcctggcgaccggcatcgcgccgcggacgccggagatccccggtatcgagcatccgatggtgatcggttatctcgatgcgatcctgcaacgcaagccggtcgggcaacgcgtcgcggtgatcggcgctggcggcatcggcttcgacgtatcggagttcatcacccatcagggcgagtcgaccagcctcgaccgcgaagcgttctggaaggaatggggtatcgatctgggactcgaggcgcgcggcggcatcgccggcatccagccggcgcctcacgcaccggcgcgtcaggtctatctgctacagcgcaagaagtccaaggtcggcaatggtttgggcaagaccaccggctggattcaccgcaccgggctgaagaacaagcaggtgcagatgatcagtgcggtggactatctgaaggtggatgaccagggcctgcatatccgcgttgccgagggcgagccgcaggtgttgccggtcgacacggtgatcgtctgtgccggccaggatccgctgcgtgaattgcaggccgagctcgaggcggcgggcgccagtgtgcacctgatcggcggcgccgatgtcgctgcggaactggatgccaagcgcgccatcaaccagggctctcgcctcgcggccgagctgtgagtgacaggccgcagcggaacctgacgactccgctgcggccttcgagtcgttgccggtgactcgcttcgatgtgttccaagaccgagaagcgggtcaggcttctgcggtgcggtgaaggccgcgttgctatccgtttacccagtcgttcgctgtttacctagcctgttcggaattctcttgaggagttgcgcatgaaccttgatcgctcgctacagcagcctgccgcagccaccctgcaacgctggcatcggatgatccaggccagagaccttggccagttgcccgagctgctgcacccgcacgccgtctttcgctcgccgatggccttcaagccctatgagggggcaacggcggtcaatctcatcctcaacaccgtgctgaccgtcttcgaagacttcgcctatcaccgcgaactggccagtgccgatggttcgaacgtggtgttggagttcagcgcacgggtcggggatcgacagctcaaggggatcgacatgatccgcttcgatgacgccggcttgatcgtcgacttcgaagtcatggtgcggccaatgagcggactgcaagcgctgggtgaggagatgggcaggcggctggcgcctcagcttgccgcgttgaagtcctgaccggcctggcgtcgctgcctgaactggcgagcaaggcgccaattcgctgccaacccagtcacagcgccggctgcgatttttcccctaaactgtgcccgcaacaactggcagcgccggagcgggcgttgtctcggaactagtcgctggtcgttcaggccgctgagggtgcacgcatgcagatcaaaccgcagacggtcgaggccgtactgttcttcaatgacggcggcgtctgcaaagaaatgctctaccccgaattcgaggcagtgcttgacggcatggtgagcatgcccgaattcgctgaccaacagatgcgcgtcgtgtacgtcctgatcaacacccgcctgcagattcgcgcggcggtgttcttctttctcgatttcaatgaagacggttcagcggacagcggctggaatatcccgctgcgcaaccttgccgagcgcaccgggcgtggtcccgacctgggcgcggggcccattcgcctggcgtgccgcagccagtgcccggtgtcctggtatcaaatgcacctctgggacccggagctcacgcagagccagaaccatctcgtcatgctgcgtgaccgcatcaagcgcaaccagttgggtttgctggtcgaggaagatacaccgcaggcggtgccggccgagcgtttgcagatggtggccgaggatgcctggtatgcggccgactcagccacgcagaccagcatccgacgggccgaaaagctggagcaggaacagcggctcaaggcggcccagctgatcaagcagcaacgattgcgtatcgccagcctcgaacagcagcgcgaagcggacataagccggctgcgcgagctggctgcgcagcaacaggccaagctactggatgagatagcccagctgcgtcaggagctgctcgacaaggaggggctcgtcgaacagctgcaggtccagttgcacgagcaggcggaaggtttccagaagaatcgtgaagagatgagccgccagctgcgggcgctggagcagaacggccgcgctgaagcggatgccgcacgggcgcagttcgatgaggaattgcggcgacaaatcgcagcggcggtagccgagtacaaggagcaggtgtcgatccgggatgtcgagttggcctaccgcaacgaactggacagccaattgcaggaggagatcgaacagttgcgagcgcgatgcgaaaccctggccgagcagagtggcgaccgggtactggagcgcctttgcgcgctgggcgtggcgttcatggcctatcaccccggcgctggacacctgaccattccattggcggacatcacccgctaccggcagaatccgctggcctatgcggcggccaagtgtgccgtatcagaggagcagtacaagcagtgggtcgagcactatcagcagccggtctgcatcgccacgctatcgagcggcgagcgctgcaatatgcccttggacaaggtggagacgcctgctcgcttcgtcctcggtgaatccaattgctgcgccaggcatcggtcgcaggagcggctgcgtacggggagctgagcgcttgcccgagattgcagagctgatttcggcgttgcgaccggcgccgctgcagctggtcgaactgccctggctacagcaagcaggcgtgcagcttgccgtgctgcgtctggatctggtcgatcctgaactatccggcaacaagtggttcaagctctgctggcatctgcgtgaagcacaggcgcgaggcgcgccagggctgatcagcctcggcggtccgcattcgaatcatcttcacgcattggcggcggctgcccggcgcgtcgggctcgccagcgtcggcctgctgcgtggacatccgcagtgcaccgagacggtggatgacctacaggcgtccgggatgcaactgcactggctcggctacggtggctatcgcgaacgataccggccggatttcttcgatcattggcgcaactgttatcccggctattactgcatacctgaagggggcggcggcctggcgggcgccaggggctgcgcgccactggtctcgcatgtacgcgaccagctcggcacgcttggctgggaggatcacgacggctggtggctggcgacgggaaccggcaccacgttggccggcttggtgatcggtgaggcggagcagggcgggcgacgggtatatggggcgctggccgggcctccctcccatggcgttgccgagcaggtcgaccggttgctgagcgaagctggggtcggcagcggcgactaccagctgatcgatgcgagccggggtggcttcggccgcttcgacaggtcgctcgctcgtttcatgctcgataccgagtgcgcaaccggcatgcccctggaacccgtctataccgcgaaagcgatgatggcattgcgccttcatgtcgagggcggttatgttgccgctggcacgcggctcatcttcgtgcacaccggtggcttgcaaggtcggcgggctgctcggaggcagctggacgagctgctgcgctgaccaccgtactggaaaaaaccggatgaccaagccgttgcttcccgatcagttgcgtagcctgatccctctcaattcgctttcgccgcgccagctgcgttctcttcgcgagcaactgattccgaggccgctcttggccggtgatctgttgttcgacagtgaggcggccgccggatccagctattttctgctcgccgggacactgcagatgcgcagcaccgagggtgagctacggcggatggccgccggctcaccggagagttgccatgcgttcgcagccggtggccgcctgtcccaggttcgggctttggaagactccagcgtgctggtggtcgacagcacccagctgaatcgcctgttggcgtggcatcaggcccatgccgatctgctgctggcattgtccagcgacggcgaactgaccgactggctggaagagctgctggagaacccgctgttcgccaaggtgccgtcggaaaatgtccgggacatgctggctaagctcgagccgatcgagctggctgccggtcatgtattgctccgcgagggggaggccggtgattgctgctacttcatccagagaggcagcgtgcagatcatggtcggcctgggcagcgaacggcagatggtggccgagttgggcgtcggtgcctgcttcggcgaagaggcattgctgactgaccagccacgcaacgccacggtgaccatgctcgaggattcctgtgtgctgcgtctggcaaggcaagatttcctcgacctgctcaaggcaccggtggtcgccgaattggacttggcgcaggcgaacgcgctgatcgcccaaggcgcccagtggctggacgttcggctactggaggagtatcagcgcgggcatgcgctggaagccctgaacatgccgttgcacctgctgcgtctgaaatcgcgcttgctggatcgggaccggctttacctgtgctactgcgatagcggcaagcgcagcgccaatgcggtgtttatcctgacgcagctggggttcaccgcctgttcgctgcgccatggcgtcgatgcgctttcggcggaggattatgccgtcttgctctgcgggcagggccgtggctacctggcccgctccggtgggcgcaccgagcgcagcggctgacgccgcgagccgcgagactcacagcggcgccgcgaacacccagcccgccgcgccaccaaccagtacgaccagccagggtgggcatttccagatcgtcagtgcggctagggcgatcagcgccaaagcgaaatcggccgggccgaatatggcgctggtccagaccggatcgtacagcgctgcaagcagcagaccgaccactgccgcgttcacgcccgccagtgctgcctgcatacggacgttcgttcgtaaccggtcccagaacggcatgacgccgaacaccagcagaaaggacgggatgaataccgagacgaggcagacggctgcgctcagcaggcgggctcccccgtcgtacatcgacccaccgagaaacgcggaaaaggtgaacagcggccctggtacggcctgcgcggcgccgtagccggcaagaaaggtatcgttgctgacccagccgttcggtacgacctctgcctggagcagcggcagcaccacatggccgccaccgaacaccaacgccccggtgcggtagaaggtatcgaccagcgccaaccagttgctggtcgaggcagcggccagtatcggtagcaggatcagcaggctgacgaacaggatcaggaacaaggtggcgatcgaacggccacgggccggttggggcggctcggacgccgcattcacttggggattgaaaaccagcagtccgatcgagccagccagcgcgatgataccgagctgcatccacggaccggacacgagcagcatcgtgcacgcggcaagcagggcgatggacttgcgtgtggggtcggtgcacaggttctgtgccatgccccaaaccgcctgcgccaccaccgcgaccgcaacgatcttcaagccgtgcaggaaaccgtccggtacagcctcgccccagcgggaaatacccaaggcgaacagcgtcaacgcgacggccgagggtagtgtgaagccggcccaggcgcataccgagccacgatagccgccgcgcagcaggccaacggcgattccgacctggctgctggctgggccggggaggaactgacagagcgcgaccagatcggcgtaacgggtttcgtccagccagcgacggcggtggacgaactcttcacggaagtaaccgaggtgggccaccggcccgccgaaagaggtcaaacccaggcgcaagaacaccaggaagatggtccatgcactgacgggttgctgatgatccgaatcgaatggtgctgatggcatcggtgggtcgcttgggttatccggttttggcgctgctggcgcgacagtatgccgtgtgtgcatgacaatttggcgagcaagtcttaacggtgtcatccaggccaagaatcgggcacgacgaacagacgctcgcactcgacccaacgcccgtcgcgaccgcgctcgaggcgggccaggagtctggcctgtccggtaccggcttgggctagccagcgcgccacgtcctcgtccggccagcgctggctgtcgtccagttgtgccggcgccagccaggcctgccggggaaggggatgccagtgcgctgcggcaaaggccgccgccgagcgcagccattcgccatgacgcagccagcgccccccgagatgcaacgggtttgcccctgcggggagctcacagctgctcggccacggctgaaacagataaccgccaagccacagggcactatcgatttcccggcacgtcagctcgcagagcaccgccttcgcgggctcgctcgccggcagatgcagctggtgttcgcagaggcgcttgagcttgatgtccagccggtcctggctgccggggccgagccaatggtcatgcttgcggcgctcgccggtttccaggcccaggtagaatttcaccgccagctcgatgtgatgtacgccttcggcgtcgcgcaggatcagatccagctccccgagtgtgctcccatcccgacggatcgccaggttggcgaccaccaactcgacgtccggcgcctggcccagtgcgaattgccagagccgctcgtaatacaaccccagccggcggttgctgtactgcgtcagccaggcctggagaacgctgggctggctatcgttccagagtagccagtcggccagctcgccggggcgagacagccagcggctggccgccaagggatgccgttgcggcgctggcgcatcgctcagcaggggcggggacagcaacgcccaggcgagatcgcgcacctgagggtgctgcagtcgtggcatcagttcggcgagacaaggcaggttcatgcagcaagcatagccgggatggtttgctgccacttccggctttcctccataatcccgccgcatcgcaacggggctccgcttggagccggtgttgaactcaaacgcgcccgcgcgacaccaatctagtgcctgttacgctccggccggcccatgaatcgcctgcacgccgctcgtttccagtcacgctatcagggagcttcaatggatcagttccgcaatatcggcatcattggtcgcctgggtagttctcaggtgctcgataccattcgccgactgaagcgattcctcgtagagcgccatctgcacgtgatcctcgaagaaaacatagccgaggtactgcccggccatggcatgcagacttcgtcgcgccagcggctgggtgattcatgcgatctggtgatcgtggtcggcggcgatggcagcatgcttggcgcggcaagggctctggccaagcatcgggttccggtgctggggatcaaccgcgggagcctgggcttcctcaccgatatccgtcccgacgagctggaggagaaagtagccgaggtgctcagcgggcagtacacgctggagaaccgcttcttgctcgaggcacaggtgcggcgtttcgaggagtccatcggtgccggcgacgcgctcaatgacgtggtactgcacccgggcaagtccacgcgaatgatcgaattcgagctgtatatcgatgggcagttcgtctgcagccagaaggccgacggcctgattatcgccacgcccaccggttccaccgcctattcgctctcggcgggcggtccgatcatgcatccgcgtctggacgctatcgtggtcgtgccgatgtatccgcacaccctgtccagccggcccatcgtggtggatggcaatagtgagctgaaaatcgtggtttcgccgaacatgcaaatctatccgcaggtttcctgtgatggccagaaccatttcacctgtgctccgggcgacaccgtcacggtgcgcaagaagccgcagaagttgcacctgattcacccgcttgaccacaattattacgaggtctgtcgtaccaagcttggctggggcagtcgcctcggtggaggcgaatagtgatcgtcgacccggagcgcagctacgacctcatcggggacgtgcacggttgtgcccatacgctgacgcacctgctggaccagctcggctaccgccgccatgcgggtgtctggacgcatgccaggcggcaggtgatctttctcggcgacatcatcgaccgcggaccacgcattcgcgaagcgttgcacctggtgcacgacatggtcgaggcggggcaggcccattgcatcatgggcaatcacgaattcaatgcgctgggttggtttacgccggcgccgcccgaaagcggtaaggccttcgttcgcgatcacacgccgcgctacgaaatgctgctgcggcagaccttcgagcagttcgagcggtatgcggatgaatggcaggcgttcctcgcctggttcatggagctaccgctgtttctggaaaacgaacgcttccgcgtcgtacatgcgtgctgggacaacagcgtcatcgatcggctgcgccagcgcctgagcgaaggccggttggatgcggattttctgcgtgaagccgccttcgccgatgcattcgccgcaaaggcgctggatcggttgttgcgcggcaccgatatgccactgcccgccgggctgacgctgaccagtgccgaggggttcacccgtaatttcttccggaccaaattctgggaagaaaaccccagaacctatggcgacgtggtgttccagcccgacgggctacccgagcaggcggcacgtctaccgctcagtgaaagccagaagagccggctgttcctgtacggtcccgatgatccgctgctgttcgtcgggcattactggcgcagcggggtgccggcgccgattcgccacaacctggcgtgcctggactacagcgcggtgaaatacggcaagctggtagcgtaccggctcgatcgggaaaccagactcgacccggcgaaattcgtctgggtgaacgtggagcgttgaatggccgtagtcgaggcgtttcgcctgccgttgtcagaggacctgagtggcttcatcgccttgctgcgccgcttgcgcgtgccctgcagggtttccgaggaggcgggcgaacaagtgctgcgggtgccggcggaaaccgtcgagcaggtccgccagctttatcagcgctatccgcaaggcgacgggatggtcgtggccgaacagccggcgcggcgcgtcggtggcttcttcgcaagtctgcggcgcagcccgtttaccgctgcggtgttgttgctgacattcatcgtcgctgccatcacgctgcttggcggaaacttcgaaaccattcgctggttcagctttaccgatttccgtatcgatggcgactacgcctatttcgcgagactcgagcagaccctgagcgaaggccagtggtggcgaatgatcacgccgatcttcgtgcatttcggcttgcttcacctagcgatgaattccatgtggtattgggagctcggccggcgtatcgagcaacgccagggtgcgtcgatgctgctcggcctgacgctgctcttcggcgtgatctcgaatctttcacagtacgctttcggcggcccgggcatcttcggcggcctgtctggcgtgctctttggcctgctgggccactgctggctgttccagaaggcctcgccgaacgaggcataccgcctgccgccaggtgtggtggtgctgatgctggtctggctggtcatctgcctgacgggcgtcgtcgacgtggtgagcttcggcacgctggccatcgccaacgcggcgcatgtcggcgggctggtggcgggatgcattacgggtgttgttggcggaatgctggcgcgtcgggcttagctgtctggctacaggctacaggctacaggctacaggctacaggctacaggcaagagcaatgcttagcctgcgggctgaagcttgcggccttcaaccgcttcttccgttagaatgtgcgcttgttctccgggagccggccatgtcgtcctttatcgaagccatcgaaaacatcacccccgaaatctacgaaaacctgaaaaccgccgtcgagctgggcaagtggagcgacggtcgcaagctgacgcccgaacagaaggaaacctgcctcggtgcgatgatcgcctgggaaatgaagaaccttcccgaggagcagcgcaccggctacatgggcggtcaggaatgcgcgtccaagagcaagagccaggcgccgatcgataccagcctgttcgccccggcttcaggaacccggcactgatgctcgaactcggacgcggcgccctcagcaaaatgtcgatccagctgggcgcaccggcgcagtattccttccgtttgaacgacgagctggtagcggtcaacccgctgatcggcaagaccctgcggctggaatacctcggtgccatccactgcacccactgcgggcgcaagaccaacaagagtttcagccagggctattgctatccctgcttcaagaagctgccgcagtgcgacgtctgcatcatgagcccggaaaaatgccaccacgatttcggtacctgccgcgatccacagtggggcatggacttctgcatgactgatcatgtcgtctacctggccaactcatcgggcatcaaggtcggcatcacccgcgccacacagctgcccacccgttggctcgatcagggcgccagccaggcgctgccgatcatgcgtgtcgccacgcgccagcagtccggcatggtcgaagatctgctgcgcagccaggtggccgaccgcaccaactggcgcgcgctgctcaagggcgatgccgagcccatcgatctcatcgctacgcgcgagcagattttcgatgcctgcgccgaaggcctgcgcgaattgcagcagcgctacgggttgcaggcgatccagccggtggccgatgccgaggtgctcgagatccgttacccggtcgaggcctatccgaccaagatcgtcagcctggacatggagaagacccccatcgtcgaaggcaccctgcgcggcatcaagggtcaatacctgatactcgataccggggtgatcaatatccgcaagttcaccgcttatcaggttgccgccagcgccgcggcgtagggtggccaaccgcgcagccttgcccgcgcgtgggttcagtccggcacgttgcggagccgtcgtcgtggtcgtggatgagcttcggcgccatccaccctacggatccaggctcaggagagaacggccagaacgttcgcgtgaacaaggcttcgccgtttccgccctacacgacgcccgccacaggcgctaagctcgggttattgcggcccagcccgaggcttgcgccatcgccactttccctgcttgaagcttgccgcttgaagctcagccgacgaggtttccatgcgcaccgaacaaccgaaagtcattcatctcaaggattaccaggttccggattacctgatcgatgaaacgcacctgacgttcgaactgtacgaagatcgcaccctggtgcatgcgcagctggtcatgcggcgtaaccctgaggccggcaccgggctgccgcgcctgcagcttcacggccaggacctggagctgatctcgctggcgttgaatgaccgccagctcggcctgggtgactacgaggtcgccgaagaaagcctgacgttgcagccggatgcggcgagcttcaccctcgacagcacggtggtgattcaccccgaaagcaacaccgcgctggaaggcctgtacaagtccggcagcatgttctgcacccagtgcgaggccgagggcttccgcaagatcacctattacctcgaccgccccgacgtgatgagcaagttcaccaccacggtcagtgccgagaagcaggcctacccgatcctgctgtccaacggcaaccccatcgccagtggcgaggaagacgacggccgccattgggccacctgggaagatccgttcaagaagccggcctacctgttcgccctggtggcgggcgacctctggtgcgtcgaggacagcttcaccaccatgagcggtcgcgacgtggcgctgcgcatctacgtcgagccggagaacatcgacaagtgccagcacgccatggacagcctgaagaagtccatgaagtgggacgaggaagcctacggccgcgagtacgacctggacatcttcatgatcgtcgcggtcaacgatttcaacatgggcgccatggaaaacaaggggctcaacatcttcaactccagcgccgtgctcgcacgggccgaaaccgctaccgatgccgcgcatcagcgggtcgaagccatcgttgcgcacgaatacttccacaactggtcgggcaaccgcgtgacctgtcgtgactggttccagctgtcgctgaaggaaggcttcacggtcttccgcgactcgcaattttccgccgacatgaactcaccgacggtcaagcgcgtcgaggacgtgtcctacctgcggacccaccagtttgccgaagatgccggccccatggcccattcggtgcgccccgagtcctttatcgagatctccaacttctacaccctgaccgtctacgagaagggcgccgaagtggtgcgcatgatccagacgctgctgggcgaggagggctttcgcaagggcagcgacctctacttcgagcggcatgatggccaggcggtaaccgtcgacgacttcgtcaaggcgatggaagacgccaacggcgccgacttgacccagttcaagcgctggtacagccaggccggcacgccgcggctcgccgtcagcgagcagtacgatgccgtcgcaaaaacctacagcctgacattccgccagagctgtccgcccacgccggggcagagcgaaaagctggcgttcgtcattccggtctcgctgggactgctggacgggcagggcagggaaatcgcgctgcgcctgcaaggtgaacaggcggcggtcggtactacccgagtgctggctgtggaccagcccgagcagaccttcacctttgtcgaggtgcccgagcagccgttgccgtcgctgctgcgtggattctccgcgccggtgaagctggacttcccctacagccgcgatcagctgatgttcctgatgcagcacgattccgatggattcaaccgctgggaggcgggccagcaattgtcggtgcaggtgctgcaggaaatgatcggccagcatcagcgtggtgaagcgctgcagctcgatcaacgtctggtcgcggcgctgcgcagcctgttggaggacgaaagcctcgatcaggcgatggtcgccgagatgctgtcgctgccgagcgaggcctacctcaccgagatcagcgacgtggcggacgtcgatgccatccatgccgcacgtgacttcgctcgccagggcatcgccaccgcgctgtacgacctgttctggaagcgttaccaggccaaccgcgaggtgtcgcggcagacgccttatgttgccgaagccagccatttcgcccgacgcgcattgcagaacatcgcgctgtcctacctgatgttgagcggcaagcccgaagtcgtggccgcctgcgtcgatcagttcgagcaggccgacaacatgaccgagcgcctgacggcgttggcggtgttggtcaactcgggcttcgaagccgagcgcgacaaggcgctcgaagcctttgccgagcacttcaaggacaacccgctggtcatggatcagtggttcagcgtccaggccggcaacacccagccgggcggcctggagcgggtgcagcacctgatgcagcatcccgcgttcacgctgaagaacccgaacaaggtgcgtgccctgattggcgccttcgccaaccagaacctggtcaacttccatcgggccgatggcgcgggctaccgcttcctcgctgaccaggtcatcgtgctgaacaagctcaacccgcagatcgcgtcacgcttgctggcgccgctgacccgctggcgcaagtacgatgccggccgccaagggctgatgaagaccgagctggagcggatcctggcctccggtgaactctccagcgacgtctacgaggtggtcagcaagagcctcgcctgataggccgatcgctgagtgcgattgacgcaaccttgaaatcccgcgcgttgccgcgggatttctcttttcggccatagacgcatgtcgtaacgccacgtcagagggcctctaggccctgtgccataaggcttgcctattaggcaatatcaatcagccatgcttaacaaaacataacgtccaggcaattgccggcggtttcgaaagccctatagcatggcttcgcctgtctccatacgcaggccctacctaataagaataaagggggtatgtatgagtgagcccgtcacgtggcgcacaccggttggtcgcgcggaaaacacgacccgcacgccgttgttcagcagtagatcgccgctggcaagaacgctctcgctctgcagtgttctctccgttctgttcttcgtaaacactccgctgcaggcgcaaaacgctgccgagccaggggttcgttatgcaatcgagtcgcagaaggcggcctcgacgttactgctcgatatcgcgtacgccggcaagcggctggttgccgtaggtgaccgcggccacatcatttattccgacgacggcggcgcctcctggactcaagccaaggtgccgacgcgccagttgctcacggcggttgctttcgccgatgcgcagcacggttgggccgtcggccatgatgcgctgatcctcgccaccagcgacggcggccagacctggacccagcagtacgaaaaccgcgagggcgaagtgccgctgctcgacgtctggttcgaaaatgcccagcacggcttcgcgaccggcgcctatggcgtgctgctggaaaccacagacggtgggcagcactgggaagacgtggccgatcggctcgacaacgaagacggcacccacctcaatgccatcgcggaaattcctggctcaggcgtgttcatcgtcggagaaatgggtggcatgttccgttccaaggacatgggcgagacctgggagcgcgtcgaatcgccttatcagggctcgttcttcggtgtcgtgggcggcggcgcgccaggcgtcgtagtggctttcggtctgcgcggacacttgttccgctcggccgacttcggggatagctggcaagccatcgaactgctcgatgacggccatccgatcgaatcggggctggccgacggcaacctgcttcccgacggccgcatcgtcgtggtcggccacggcggcacggtgctcagcagcgatgaccagggccggacattcaagctgttcagcagacccgatcggcgctccttgtcgggcgtggtcgccaacccggacggcaatctggtcctcgtcggccagagcggcgccagggtcgtttcaccgaccggcgccaacctgcctgcacaacaacaataagccggagccaacatgaccaagcatcagcagaagccggcgtctttcctagagcgcctgatcttcaacaatcgtccggcggtgatcctgatctgcctgttgatcagcatatttctcttctaccaggcggcgcaggttcgtccttcgaccagcttcgagaagatgatcccgctgggccatccctacattcagaacatgctccagcaccgggatgatctggccaacctgggcaacacggtgcgcatatccgtggcggcgaaggacggcgacatcttctccaaggagtacatggagacactgcgtcagatccatgacgaggtgttctacatccagggcgtcgatcgctccaacatgaagtcgctgtggagtcccagcgtccgctggaccgaggttaccgaacagggcttcgccggtggcgaggtcattccgcagacctacgacggctcgccggaaagtctcgacgatttgcgcagcaacatcctcaagtccggacagatcggccggctggtggccaacgacttcaagtccagcattatcgacgtgccgctgatggagtcctattcggacccggatgaccgcagcaagcagatcaagctcgattaccagaagttctcccacgagctggaagaaaagatccgcgacaagtaccaggcgcagaacccgaacgtggaaatccacatcatcggcttcgccaagaaggtcggcgacctgatcgatggtctggttggtgtcgcgctgttcttcttcgtcgccatcggcatcaccctggcgttgctgctgtggttcacccgctgcatcaagagcaccatcgctgtggtggtgaccaccctgatcgcggtcgcctggcagctcggcttgttgcacacgctgggtttcggtctcgatccctattcgatgctggtgccgttcctggtcttcgctatcggtatttcccacggtgtgcagaagatcaacggcatcgcaatggcttccggggaaaccaatgacccgctgtcagcggcgcgcctggcgttccgccagctgttcattcccggcatggtggcgttggcctcggacgccgtgggtttcgtgaccctgttgctgatcgacatcggcgtaatccgtgagctggccattggtgcgtccctgggcgtggcggtgatcatcctgaccaacctgatcctgttgccggtggcgatttcctacctgggtatcagccagcgtgcggtcaagcaggcgcgggaagaggctgcgcgcaaccatccgttctggcgtgccctggccaacttcgccagcccgacggttgcgccgatctctatcgtcattgcgctgttggcggtcggcggtgggctctggtatggccagaatctgaagatcggcgacctcgaccagggcgctccggaattgcacccggattctcgctacaacctcgataacgatttcgtgatccgcaactactcgaccagttccgacgtgctggtggttatggtcaagacggcgcccgaaggctgtgcccattacgacacgctggcggcaatggacgagctgatgtggcggatggaaaacaccgagggcgtgcaatcggcggtctcgatggtgaccgtcgcgcggcagagcatcaaaggcatgaacgagggcagcctgaaatgggaaacgctgtcacgtaaccagttcgtgctcaacagctccatcgcccgtgccgaaggcatgtacaacagtgattgctcgctggcgccggtgctggtgttcctcaacgaccataaggcggagacgctggatcacgtggtgtccgttgctcgcgattttgccgagcaaaacaaccgtgaagggctggagttcgtcctcgctgccggtaacgccggaatcgaggcggccaccaacgaggtcatcgccgcgtccgagacgaccatgctgatcgcggtctacgccgctgtgagcttcatgtgcctgctgacgttccgctccgtggcggcgacgctttgcgtgatcctgccgctggtgctgacctcgatcctgggcaatgcgctgatggccttcatggggatcggtgtgaaggtcgcgacgctgccggtgatcgccttgggcgtgggtatcggcgtggactacggcatctacatctacagccgcctggaatcctacctgcgccagggcctgacgctgcaggaagcctattaccagaccctgaaaaccaccggcaaggcggtgatcttcaccggcatctgtctggcgatcggggtgttcacctgggtcttctcggcgatcaagttccaggccgacatgggcctgatgctgaccttcatgttcctctggaacatggtcggcgcgatctggctgctgccggcactggcgcgcttcctgatcaaaccggagaagctgcggcaaaaggcgtgatgctctcgtagcgaaaaaaaccgcggccccagggtcgcggttttttttttgctggcagccttgagcgcgggctattcggcacggctttgcacgctgcttggcacttggtgtgactagaggcgcctcagggtctggcgcctcctttggcattgggccacctgcgcaatgcatcgcgcatccagccgacgaggacaggaggcttccagcgcgaagtctatgcccattcctatcgaaacgagcttcgcgcccaatcaagtaacagcgaagcgccgttcgatggtgatggtctggctggtcagtgtgcagtggcaaaggctaatgagttgtcatcgtgcggctctggccagggatgagcgcctatcgttgcatcacgacctctccggttgcgcaaatgccgtctagcgcaacccatccatcacctctggccgccagctatacagcggcaagccctgcatgttggaccagttccagcaacggctgcgggtagacgccgaggaagaaggccagcacggcgatcgccaatagcatgatgccgccggcacgctgcccccagttcgacggcgcatcgtgacggcggatgcccggttcgaccagatacagcgtcaccacgacgcgcaggtagtagaacaggcccacggcgctgccgatgatcaacgcgcccagcagccaccacagctgcgactcgacgccggatgcgatgacgtagaacttgcccacgaagcccgccgtcagtggaatcccggcaagcgacagcatcatcacggtaagcaccgccgtgaggtagggccggcgccagaacaggccgcggtactcgtacagcgcgtccgcatcccgccctttgtaggggctcgacatcaggctgaccacgccgaacgcaccgagagtggtcagcagataggtcaccaagtagacgccgatagcctcgaccgccaagcccttgctggcgatgaacgcgaccagcaggtagccgaagtgggcgatggacgaataacccagcaggcgcttgagattgctctggttcagcgccagcaggttacccatcaggatcgacgcgatggcgatcaggctcagcgcatcgttcagccagccaccgctggtggcgggagacagctgatacaggcgcagcagcaccgcgaacaccgccaccttgctggccgtcgccagaaaggccgcgaccggtgccggcgcgccttcgtagacgtcgggtgtccacaggtgaaagggcgcgagcgaaagcttgaagcccagaccgaccagcatcatgccgatgccggcctgcaccaggatggacgagccttgtgccgccaggctggcgccgatgccggtgaaatcgagactgcccgattcggcatagagcagtgccatgccgaacagcatgaaggcgctgccggcgccggacagcaccatgtatttgattccggcttccagcgagcgcttgttgaagaaggcataggcaaccaacccgtagaccggcaccgagagcaactccagtccaatgaagagccccgccaagtgttgcgtgctgaccagcaccaatcctcccgcggctgccagcgacatcagcaggaagagttcctcacgattgcccggaaatccttccgaatcggcttcgccgagataggcatgcgccagcgtcacgcaggccaaggttgcgaccagcacgagagccgaatagaagtaggcgaatgcatccagccgcagcatgggcgtgacgttcagcgagcccacttgcagcgctggcacgatcgaaagcagcgcaagcgtcaggccagcggaggtgacgacgaaggtgaggccgtagtggcgtcgccaggcaatcgtcaacatgaccgcgatggcggtggcgccggtgatcagcagaggtagcagggcgatgatgtattgatgagtcaattgcatagcggttactaccgggccgaaacggttggggagaaagcggcatcgagccattgctgcacaccgctgatggtcgcgagcgaggtgtcgaacacccgctgtgggaacacgcccagcaggaccagcagcagcgccaggaccagtaccatggacacctcgcgcccatccaggccctgtagcatcccctctacacgggacgggccgaagtaggcgcggtgaatcatcgccagcgagtagaccgacgagagcaccaggccgaaggtcgcgatcaccaccacccagggcgaatcggcaaaggcgccgaacagcaccacgaactcaccaatgaagttgccggtgcccggcaggcccagcgaggcggcggcgaagaacaggctcagtggaggaagccacggcaggcgcgaccagaggccgcccatttcgcgcatgtcccgggtatgcaggcgttcatagagctgaccgctgaggatgaacagcgccgccgccgaaaggccgtgggcgatcatcagcaccacggcgccttgcaatgcgagttggctgcccgagtagatcccgatcagcacgaagcccatgtgcgagacgctggaataggcgatcagccgcttgatgtcggtctgtgcgaacgagagcagagcgccatagaaaataccgagcagccccagccccatggcgatcggcgcgaagtccatcgaggcttctgggaacagcgggagggcgaagcggatcatgccgtaggcggccgtcttcagcaggatcccggccaggtcgaccgagcccgctgtcggcgcctgggcatgggcgtcgggcaaccaggaatggaacggcacgatgggaaacttcaccgcgaaggcgatgaagaagcccagcatcagcaggtactcgatgcccggcgccagctcggctttgagcagcaattcgtagtcgaaggtaagggtgccggtgttgtggtaattgaccaggaccagcccgaggatcgccaccagcatgatcaaaccgctggcctgggtgtagatgaagaatttggttgccgcattgatccgcgaacgcttgccttcggcgctatggccccagagtgcgatgaggaaatacatcggcaccagcatcatttcccagaaaaagaagaacaggaacaggtcgagcgcgaggaacaccccgaccacgccgccgaggatccacatcaggttcaggtggaagaagccgacgtggcgctggatctctttccaggaacagagcaccgagagcacgccgagcagtccggtcagtatgaccatcagcagcgacaggccatcgagcgcgaggtgcaggttgatgccgaagcgctcgatccagacgtgcttgaactgcagcgcccagttggcctcggcgccaggagcgggggccagctgataattgccggttgcccacagccagaggccgatcgcgagcagcagcgccatggtgagcagggcgatccaacgtggcaggctcttgtcgaaatgttcgacgagccagcagagcaggccgccgatgaagggaatcaggattaaccagggcagaatcacgggttcgagtccttgcgcagattcagagcagaacgacgccgagcaacagcacggctccgccaacgatggacagggcgtaccagcgcaactggccggtttcgctgcggctcaacagggcatggctgccacgtgccgtacgcggaatcaggccgatggtggcatcgacaggatcgcgggcgagcagtcgggtcagccacagatagggctggacgaagagtttgtcgtagagccagtcgaagccccaggcggcgtaccaccaggcggtcaggaagcgcccgggcgcgctctgcgccaatgcagtcaccaggccacgcttgccgaggaacagcatggcggcgagcaggatgccggccagggcgatggcgcccgacgcgatttccagactgtgcttggcttcaccgccggcatgcccgacgctttctggcaggacaccggccagcggcggcgcgatcaaggcgccgacgaacgtcgacaacaggatcagcaccaccagcggcacgctgtgtgcaataccgtggccggcgtgggcctcgaccttcgcttcgccgtggaaggcgatgaagatcagtcggaaggtgtacagcgaggtcaggaaagcacccgccaagccggcgtagagcaaaccgctgtgaccgctggcgaaggcttcccagagaatctcgtccttggaatagaaaccggcggtgaccagtggcaacgccgccagcgccgagccgccgacgatgaagctcgcgtaggccagcggcagtttccgccacagcccgcccatcctgaaaatgttctgctcgtgatggcaggcgtggatcaccgcgccggaggcgaggaacagcagggccttgaagaacgcgtgggtcatcaggtggaaaatcgccgcgtcccaggcaccgacgccgagcgccaggaacatgtagccgatctggctcatggtcgagtaggcgaggatgcgtttgatgtcggtctgcaccagcgcggcgaagcccgccagtaccagcgtcacaccgccgacgatgccgaccagctcgtgcacgtccggtgcgagcaggaacagcccgtgggtgcgggcgatcaggtagacgccggcggtaaccatggttgctgcgtggatcagcgcggacaccggggtcggaccggccatggcatcggccagccaggtctgcagcggcagctgcgccgacttaccgaccgctccgccgagcagcgccagggtcgccaatgtgatccagagatcgccgctggcgaacttctgcggcgccagcaccagcaactgctggatatccagcgtgccgagctggacgaagaggatgaacagaccgaaggccatcagcacgtcgccgatgcgagtcacgatgaaggccttgagtgcggcattgccgttcttgcgctccttgaagtagaagccgatcagcagatacgagcacagccccacgccttcccagccgaagtacagcagtagcaggttgtcgcccagtaccagcagcaacatgctgaagatgaacaggttggtgtaggcgaaaaagcgcgagtagccttcttcaccgcgcatgtaccagctggcgaacaggtggatgagaaagcccaccccggtcaccacgccgagcatcgtcagcgacaaaccgtccaggtgcaggccgaaggcgacgctgaaacccgccacgtccagccactgccagaggtgctgggtaaacacgccatcgacgggcggcgtggtattgaactgccagatgcacagcgccgcgatcagcgccgacaggccgaccgagccgacgccgatcgtggcggcgaggttttcggatatccgtccgcgcgagaaggccagcaggaagtagccgagcagcgggaaaacgaaggtcaggaataataggttcatccgcgcatctcgcttgcagcatcgacgtcgagggtgttgaagcggcggtacagctgcagcaggatcgccaggccaatggccgcctcggcggcagccagggtgatcaccaggatgaacatgatctgcccatcgggttgcccccagcggctgccggccacgacgaaggcgaggcccgtggcattcatcatcacttccaggctcatcagcatgaacaggatattgcgccgcaccatcaggccgaccagccccaggcagaacagcaaggcggcaacggccagaccgtgctccatcggtattgagtgcatgggttactccttcgcctcgtggcggccaaggtggaaggcggcgaccagcgctgccagcagcagcatcgaggccagttcgacggccaacaggtaaggtccgaagagcgcgacgccgacttctttcggccccacggtggtcagccctgcaggcgcgtattcggagactgaaaacagcgcccagagcaattgggccagcagaatcgccgccaacagcgacgggccgaaccacacgcggggcgccatccagccgcgctcctggctgacggtgttgcgacccaggttgagcatcatcaccacgaacacgaacagcaccatgatggcgccggcatagacgatgacctcgagcgcgccggcaaagggcgcgccgaggctgaagaagcacatcgacacggccagcaacgaggtaatcaggtagagcagggcatgcaccggattgctaccggttatgaccctcagcgtggcgaccaccgccacgccagcggaaaagtagaaagcgaactccattacaagctcctggaacgctggaaggctgaaagctgcaggctgaacgaaaaagccgtgccctgaccctgtgggagcggtctcgaccgcgagctttcaggacccgattcgcggtcaagaccgctcccacggatacctgatgcccacggccagcgcttttcatcgacagccgtcatggcaacaaccccttgacgttgatcggctcggcctcgttctgcgcggcgcccttgggcttaccggcgatggccaggccggagacgcggtagaagttgtagtcggggtatttgccggggccggaaatcagcaggtcttccttctcgtacaccaggtcctgacgcttgtactcgcccatctcgaaatccggggtgagctggatcgcattggtcgggcaggcctcttcgcagagcccgcagaaaatgcagcgcgagaagttgatgcggaagaactccgggtaccagcggccttcgtcggtctcggccttctgcagcgaaatgcaggccaccgggcaggccaccgcgcagaggttgcaggccacgcagcgctcctcgccgtcggggtcgcgggtgagcacaatgcggccgcgatagcggggcggcagataaaccgcttcttccggatattgcagggtgtcgcgcttgcgaaagccgtggctgaaaaccatcaccaggctgcgtagctgggtgtaggtgccgtgcagcaccgcgccaatgtatttgaacatggtgtttgctccttactgggccgcggccagcacgaatgcgccggtcaccagcaggttgatcagggtcagcggcaggcagaatttccagccgaaggccatcacctggtcgtagcgcgggcgcggcagcgaggcgcgcagcagcacgaacagcatgatgaaaaacccggttttgatggcgaaccagaagaatgacagccagggcagggcgtcgaggaacgggccgtgccagccgccgaagaacagcgtggtcagcagcgccgagatggtcacgatgccgatgtactcgccgacgaagaacatgccccacttcatgcccgcatactcgacgtggtaaccgtcggccagctcctgctcggcttccggctggtcgaacgggtggcggtgggtgaccgcgacgccggcgatgaagaacgtacagaagccgaggaactgcggaatgatgaaccacaggtgctgctgctggtattcgacgatgtcacgcatgttgaaagagccgacctgggcgacgatgcccatcagcgacaggcccagaaacacctcataggacacagtctgcgccgaagcgcgcagggcgccgagcagggcgaacttgttgttgctcgaccagccggcgaagagcaccgcgtagacggtaaggcccgccatggcgaagaagaacagcaggccgatgttcaggtccgccacgccccaggtcggtgttatcggcacgatggcgaaggcgatcagcagcgaactcatcgccaccaccggtgccagggtgaagatcaggcggtcggagaacggtggattccagtcttccttgaagaacatcttcaacatgtctgcggcgagctggaacatgccgaacggcccgacgcggttgggaccgtagcggtcctgccaccaacccagcaggcgccgttcgacgaagctgagcagcgcaccgcagaccaccaccgcgagcatgatcaccagcgccttgacgacggcgacgatcacatcgatcacttcgggagtcagccagttcatcgggcgccctccagttcagtggccaggcaggtgctgttcaggaccggaatgccttccaggccaaccggcagaccgaccaggccgagggccagggatgcatcgatgcggaccggcagacgcagcggccgatcggcgacacgcagactcagcagctcgccttcggccacgccagcgcggctggcttcggcttcggccaaggcgacgtaaggttgcgggatgcggctctggatcggggcggcgagagccgaggtttcgtcgctgccgaacaggtgatgcagtggcactacctgccaggtgccgagcgcgggcgtgaaagcacgcggcgcggttttccagtccaggtcctgacgtacatcgtccaacaaacgaacgcccggatcgccggcgcgcaggtgaccccccacttcatcctggaacttgttccaggcctgcggcgagttccagcccggcgaccaggcgaacgggatctgctgacggtcctcggcgctgcccgaatagccttccatggaaaaggcgaacggcgaatccggatcctgcggctgacgcggctcgtgcacgctgatgttggcgcgcatggcggtgcgtccgctgtagcgcagtggttcgcgcgccattttcaggcccttgatgcggaacgaagcgagcggcgccgcatggaggatgcccgccaggtgcgggttggttgctgcgcagttcgcggtgacctgatccagtgtggtccagtccaccgccttcccctgcagcgtgcagtgcagcgcgtgcatccagcgccagccttcgcgcaccagcaccttgctgtcgtagtagctgggttcgaaaacctggaagaagcgctgcgcgcgaccctcctggctgaccagcgtgccatcggcctcggcaaagctggcggccgacagcacgaggtgcgccttggccgtggtcgccgtctgctgatgatcggcgacgatgacggcgctggcggcggcgagggccgcatcgaccttggcctggctggcacggcgatacagatcgttctcgagcacgatcaccgcgtcggcactgcctgcaatcagggcgtccagcgcagcttccacggactcgccaccgagcagcgcgacgccgaggctgttggcttccggcacgacaaggctgatcgaggcgttcttctcacggttcttcagcgcctgggcgatgttgcctgccgcttcgatcaggctcttctcgcccagcgaggcgccgctgatcagcaacgggcgcttggcggcgagcagggcgtcggcgatccgttgtgccagttcttggccctcggcttccagaccctcgacagccggtgcgctcggatcgatggcatgcgctacggcgaaaccgaggcgggcaagatccgccggcgcggcgtgcacgctctgctcggcgatgtcatcgaggcggctctcggcgacgctggcgatgaacacgggatgcagggcgccttgtgcgacgttctgcaccgcggcgatgtgccaatcctgaatcttcatcgaggcggcgatctcggtggccttgcccttggcggcctggcgcacggccagcgccatgcgcgcggctgtctgggtgaggtcttcaccgagaatgaacaccgcgtcgtggctttcgatatcgcgcatcgatggcaccggtagcgggccgtgttgcatcagctggcggatcagccggatattttcaagttccgtggcggcgacgccgctgtagaagtcctgcgcaccgaccagctcacgcagcgcatggttgctttccaggctggcgcgtggcgagccgatgccgatcacccgcttgccgtccagcaggccggcagccgcgtcgagggcggcgtcgacaccgagtttatccgtgccgaggagcggctggcggggccggtccgcgcggttgacgtagccgtagccgaaacgaccgcggtcgcataggaagtagtggttcacctcgccattgaagcggttctcgatgcggcgcagctcgccgtagcgttcgccggggctgatgttgcagccggacgaacagccatggcagatgctcggcgcgaactgcatgtcccacttgcggttgtagcgttcggagtgggtcttgtcggtgaacacgccggtggggcagacctcggtgagattgccggagaactcgctttccagcacgccgtcttcgacgcgaccgaaatagaggttgtcgtgggcgccgtagacaccgaggtcggtgccgccagcgtagtccttgtaatagcgggtgcagcggtagcaggcgatgcagcggttcatctcgtgggcgatgaacgggccgagctcctggttctggtgggtgcgcttggagaagcgataacggcgctggttgtggccggtcatcaccgtcatgtcctgaaggtggcagtgaccgccttcttcgcacaccgggcagtcgtgcgggtggttgatcatcaaccattcgacgacgctggcgcggaacgccttggcttcctcgtcttcgatggagatccagctgttgtcggtcgctggcgtcatgcaggacatgaccaggcgaccgcgggtgtcgttttcatcggagtactgcttgaccgcgcactggcggcaggcaccgacgctgcccagcgccgggtgccagcagaaataggggacatcgaggccgagcgacagacaggcctgcaacaggttgtccgccccatcgacttcgtagtctttgccgtctacgtggatagtggccatttctaggtcttctcatccgcttgcgcgggtctggctaataggaaatcttttcgcttcaggcttcaggcttcaggcttcaggcttcaggcttcaggcttcaggcttcaggctggctgtggcggtgtggcgctcacctgggcaacgcccgcctcgaactccgagcggaaatatttgattgcggcgcccaggggctccaccgcgccgggtgcatgggcgcagaacgtcttgcctgggccgaggaagtccaccagccgcaacaggatgtcgaggtcctgggcagtgccttgaccgcgctccagcgcacgcagggtcttgacgctccagggcaggccgtcgcggcacggagtacaccagccgcaggattctcgggcgaagaactcttccatgttgcgcagcagcgaaaccatgctgacggtgtggtccacggccagtgccagaccggtgcccatgcgcgtgccgaatttggcgacgccgcctgcgtacatctgtgcttccagatgctcgggcagcagaaagccggtgccggccccgccgggctgccagcacttgagctggtaaccgtccttcatgccgccggcgtagtcttcgaacaactcgcgggcggtaatgccgaagggcagttcccagatgcccgggttcttcaccttgccggagaagcccatcagtttgctgcccatgtcttcactgccgggacgggccagcgacttgtaccagtccacgccattgccgatgatcgccggcacgttgcacagggtttcgacattgttgacgcaggtcggcttgccccagacgccgacggcggcggggaagggcggcttggcgcgcgggttggcgcggcgcccttccagcgagttgatcagcgcggtttcttcgccgcagatgtagcgaccggcgccggtgtgcacgaacagctcgaaatcgaaaccgctgccgaggatgttcttgcccagcaggccggcggctttcgcttcgtcgatggcccgggtgaggttgcgcgccgcatcgacgtattcgccgcgcaggaagatgtagccgcgataggccttgagcgcgcgggcactgatgatcatgccttcgatcagcaggtgcggcagctgctccatgagcagccggtccttccaggtgttgggctccatctcgtccgcattgcacagcaggtagcggatgttcagcgattcgtcggccggcatcaggccccacttcacgccggtgggaaagcccgcgccgccgcggcccttgaggccggaatccttcacggtctgcacgatgtcggcgccggccaggtcggccagcgccttgcgcagcgcgtcgtagccagccttctgccggtattcgtcgagccagaccggctgcccgtcgtcgcgcagacgccaggtcagcggatgggtttcttcgcgacgctcgatgcggttggccgggccgaacgatgccagttgcttgatgacgttcattgataggcctccagcagggctgcgacaccgccgggctgcacgtcgccgaaggtatcgtcgtcgatcatcagtgccggtgccttatcgcagttgcccaggcagcagaccgggatcagcgtgaagcggttgtcggcggtggtctggcccggcgcgatgccgatttcgttcctgatgctgtccagcacgctctcgtgaccgcctatgtagcaggtcatgctgtcgcacacccggatgatgtggcggcccaccggcacgcggaaaatctgactatagaaggtggcgacgccctcgacatcactggccgggatgccgaggatttcgccgatggcatcgcaggcgccgtccggcacccagccacgggccttctggacgatcttcagcgcctcgatggaggctgcgcgagggtcttcgtaatgatgcatttcgtgctcgatggccgagcgctcggcttcgctcaaggcgaaacgatcagtcttgattactgtgctcatatcagcggtccacgtcggccataacgaaatcgatgctgcccagatacgcgatcaggtcggggatcatgctgccgttgattaccgacgggatctgctgcagatgcgggaagctgggcgtgcggatgcgcgtccggtagctcatggttccgccatcgctggtcaggtagtaactgttgatgcccttggtcgcctcgatcatctgcaggctttcgttggcgggcatcaccggcccccaggacacctgcaggaagtgggtgatcagggtctcgatgtgctccagcgtgcgctctttgggcggcggcgtggtcagcgggtgatcggccttgtagggacctgccggcatgtgcttgaggcactgttcgatgatcttcaggctctcgcgcatctcgcccatcttcaccatgcagcggtcgtaggcgtcgccgttggcggccagcggcacctcgaagtcgaagtgctggtagccggagtagggccgcgccttgcgcaggtcgaaatcgagaccggtggcgcgcaggccggcaccggtcacgccccagtccagcgcctgtttggtgttgtaggccgcgacgcccttggtacggccgatcaggatgctgtttttcagcgcggctttttcatattccctcaggcgcttgggcatccagtcgaggaattctcgaaccagcttgtcccagccgcgcggcaggtcgtgagcgacgccgccgatgcgataccaggccggatgcatacggaaaccggtgatggcttcgatcaccttgtaggcgcgctggcggtctgtgaaggtgaagaacaccggcgtcattgcgccgacgtcctggatataggtacccaggtagagcaggtgattctggatgcggaagaactcggccatcatcacccggatgaaatcgacgcggtccggcaccttgataccggccagcttttccaccgcgagcacgtagggcaggttgttcatcacgccgccgagatagtcgacgcgatcggtgtaggggatgtagctgtgccagctctggcgctcgcccatcttctcggcgccgcgatggtgatagccgatctccggtacgcaatcgagaatctcctcgccgtcgagctgcaggatgatccgaaacgccccgtgcgcggagggatggttggggccgaggttgaggaacatatagtcctcgtgctcgctgccgcgcttcatgccccagtcttccggcttgaagcgcagggcttcctgttcgagctcctgcttggcggcgttgagcatataggggtcgaattcggtggcccgcgcggggtaatccttgcgcagcgggtggccttcccagttcggtggcatcagcatgcgcttgagcagcggatgcccctcgaagtcgatgccgaacatgtcccagatttcacgctcgtaccagttggcattgggccagatggtcgaggcggtgggcagtcggaggtcgctttcactgagcgccaccttgatcatcacgtcgctgttccgctccagcgacatcagctggtagaacacactgaaatcggcagccggcaggccgcggcgatgggtacgcaggcgctcgtcggtggcgctcaggtcgtagagcatcacgtagggcttgctgacctggcgcaggaagcccagcacctcgatgagcttttcacgcggaacccagagcaccggcatgccggtcaggctgggctgcacggtgaaggtctcagcgccgaagcgcgcgttcagttcgacgacgatatccccgtcgtctgccttgtagggcgggatgtacagagcattgcctgcagtcatgatctcggtcgctttcggtcaacggttgggtgtgcgggggccttcctggcggaaagccaggctcacacgtcgtcggggctgcgcaggttggtgacctggatacgctgttcgcgtcgctgttccttctgcgacggcatctcggcgcgatagacgccttgatcgccgacgacccaggaaagcgggcgacgctccttgccgatggattcctgcaacagttgcaaaccttgcaggaacgcctcggggcggggcgggcagccgggtatgtagacgtcgacagggaggaacttgtcgaccccctgaacgaccgagtagatgtcgtacataccaccggagttggcgcacgaacccatggagatgacccacttgggttcgagcatttgttcgtagagacgctggatgacgggtgccatcttgatgaagcaggtaccggcaatgaccatgaagtcggcctggcgcggcgaggcgcggatgacttcggcaccgaagcgggcgatgtcatgaggcgcggtgaaggccgtggtcatctccacatagcagcacgacaggccgaagttgtacggccagagggagttcttgcgcccccagttgaccgcgccactcagcacgtcttccagcttgcccatgtagatgttgcgatgaacctggtcttctaatggatcggcaacagtctcctgttggccgaccggatagcgatcaacgaccgcatccggatcgatccgggtaagtttgtattgcatgccaagagcctcattgttttagcttcgcctgtcgctcgcgacggctggatggcgcccaatcgagcgcacccacccgccacagataaacaagacccgccaacagaattgctatgaatacggtagcttcaatgaggcccgcccagccgctttcgcgtaccgagacagcccaggcaaagagatatagggcttcaacgtcgaagatcacgaagagcatcgcgaccagatagaattttgcggaaaaacgcagtcgcgcactgcccgtgggcaatatgccggactcgaaaggttcgttcttggcgcgaccccaggccttgctgccgagcaggctggaagcgccgagcatgaacgcgcacagcgcgatgacgccgagaagaaatacagcgaagccccagttgtgggacagagtgacatcaggcatgccggactccctggaggaacggctttattgcagctgcggccaagcgtcgcaaccttgtgatgggtgcacatactatgcccatataaagtgcacgtacatgtttctgacgaaacttattgaaatatttttgttggttcgtccctttcggcctgaagcgcgggtgcggcccgataaggctctagatcggcagatcaagcaagatcaggagcctgcagtcggctgaatcggttgctctgccgtatccctcggccggcatcaggccgcgctgccattggcttgtttcactcgaccgtcgccataagtcccctgtgtcgctgccacttcaccgatgaccaggatcgccgggctcttgagttggaagcgtgccgcgtcgacgcacagagcggcgagggtggagcggcattcgcgctgccgcggcagggacgcgttttcgatcatggccaccggcgtgctcgccggcaggccgccttcgatcaggccgttctgcacctgctgcaaactgctcacacccatatacacgaccagtgttgtgccgctcttcgccagcgcatgccactcggggctgctgccgtcgagcgtatgcgcggtgaccagcgtcacgccgcgggcaataccgcgctgggtcagggatatcccgcactgggtggcgcccgccagccctgcggtgatgccgttgaccatttccacttcgatgccgcgctcggccagccattcggcttcttcgccgccgcggccgaagatgcatggatcgccgcctttcaggcgcaccacgcacttcccctgacgggcgtagcgcagcatcagccggtgaatgaaggcttgcggggtcgagcggcagccgccgcgcttgcccaccggaatcacccgcgcggttgggctatgttcgagcacggcgggattgaccagatcgtcgatgagcaccacctgcgcctcgcccatggcgcgcacggccttgagcgtcagcagttccgggtcaccaggacctgcgccaaccagccagacttttgcgctcatgtttccacctctcgtgctgccgtgatcgtgtcgacgatgcaagatgcaccgcctgttcggttgttgcgtcaggccaccgccggcgttttcaccagcagtcgcttgatttccggtacgcaggagccgcagctggtgccgcagcccagttccttcttcaagccattaaggtccagccctcggtcgatgccggcacagatcgcctcctgactgacgttcatgcagttgcacagcgtcttgccggtcttgaattcgctgccacctggaggggtgctcagcggtgcgagcatccagcgccgcagcgcggcatcggccttgccgtcctgccagagggttttcagccagtgacgcgcggccgtctcgccggaaaggctcagggcaacgatgcggccttcatcgatccggacccgcttgccgactgcgcgccgtggatcgtcgtaggccactacgggaccttcgtcgagcccgagcagctgatcgaattgcgccagttgctctgcgctaggggcctcggtgcaggctgcgcggaccaccagtgccgggcggtcacggccggccaggctgaagctggcgtaggcgaagccgtcgaacagcgggcgcagggcttcgaagcgctgctgcaccgcgccttccaccagggcaaagaactgccagggcagctcgaccgcctccacttcgattccggcgtgcttgagctcgggctgtttcgacagcggatcgcaggcgggcacggtgatgacattcacgcccagccccttgagaaaacgatcgccccagtgcatgggcacgaacgcctggccgacccgcaggctgtcgtccttctgcaccggcagcaccagatggccgcgacggctcttgattctgaccaactgaccgtcgagcagacgacggcggcgcatgtcgtcggcgttcatgccgaggaccgcttcttccacatgaccgaataaccgcgcggcggtgccggtgcggctcatgccgtgccagtggtcgcgcagacgacccgtgttgaggatcagcggaaagcgcgcctcgcgctcttcctgtggtgcctggtaatgctcggcgagaaagcgtgcccggccattctcggtcgggtataccccgtcgccgtagagccgcgccgtgcctcgctcactgccggcggggaagggccactgctgcgggccgagttggtcgatcagcgcgtggctgagtccggacagatccaggtcgcggccctgggtgagcagcttgtattcctcgaacaacgcggcggcgctatcgaatgcgaacaggctggtctggccggggcgcagcaggccttccagacggcgggcgaagtcgcaggtgatcgaccagtcggcgcgggcctcgccaggggccgggacggcggcgcgcacgtggctgacgcgacgctcggagttggtcaccgtgccttccttctcgccccaactggcggcgggcagcagcaggtcggcgtagcgacaggtctcggtggtgaagaaagcttcctgaaccacgacgaaggggcaagcggccagtgcgtcgtggatcttccgctgatccggcatggattgagcggggttggtgcaggcgatccacagcgccttgatccgcccgctgtgcacggcgtcgaacagttcgatggcggatagtccggtggtttcgggcagcctgtcgacaccccaatacgccgcgacttcggcacgatgcgcggggttgccggcttcgcgatggccgggcagcaggttggacaggctgccggtttcgcgaccgcccatggcgttgggctggccggtgagcgagaagggcccggcgccggtgcggccaatctgtccggtggccagatgcaggttgatcagcgcgctgttcttggcgctgcccgaactcgactgattcacgcccatgcaccagagcgacagaaagctcggcgcgttgccgatcatccgtgcacagctttgcagttcgttcacgctgatgccgcacaggtcggcgaccatcgacgggttgtagtcgcgcgcgaggtgcttcaactcatcgaagccgtcggtgtgggcatcgatgaagtcccggtcgatccagccttcccacagcagcaggtgcagaatgccgtggaacaaggcgacatccgttcccggcaggatgccgaggtgcaggtcggccagttcgcaggtgtcggtgcggcgcggatcgacgacgatgaccttcatgtccggccgtttcgccttggcgtcttccagacggcggaacaacaccgggtgggcataggccatgttgctgccgacgatcagcacgcagtcgctctgctcgatgtcctcgtagctgcagggcggcgcgtcggccccgaggctgcgcttgtagccgaccaccgcagaagacatgcacaggcgggaattcgagtcgatgttgtgggtgccgaccagcgcccgggcgagcttgttgaaggcgtaatagtcctcggtcagcagctggccggagatatagaacgcgacgctgtcggggccgtgttcggcaatggtttcggcaaacaccttggcggcgtgatccagggcgctgtcccagtcggtgcgggtacgggccaggcccctgcccaggcgcagctcgggatagagcgcgcgggcgtcgaggtcgccggtcaggtgcagggtcgaacccttgctgcacagcttgccgaagttggccggatggttcgggtcgccggcaacatcgaggatgcgttcgccgtcgtgctcgatcagcacgccgcagcccacgccgcagtagcagcaggtcgaggcggttgtctggcgcatggcgtcgtctcctggcagttcgttcatgggtagctcacggcgctcaggcgcactcggttgcgttgttcagcgaaagcagcacgcggccgttctcgacgcgggcttcgtggcgatgcgcacagcccacgtcgggcgccacggcttcgccgctgtccaggttgatctgccagttgtgcagcgggcaggcgacctgcttgccgaagacgatgccctgcgacagcggaccgcccttgtgcgggcagcggtcgtccagggcgaatacctgatcgtcggcggtgcggaacaccgcgatgtcgcccttggggccggcgacgatgcgtgcgccgagcgggttgatctcgtccagggagcagatgtcgaaccaggtcatggtgatttcctcgaatggcaggcggtgtcggtcgagcctagatttcaggcgggctcgatcgatttgagctggatcgtttcgtattcctttttcagcgactgttcggcgatggccttcttccagccgtcgccctcgaagctcagcgaatacatcaggcgctgactcagggccttgcgccgggcttcatcttccagaacggacttcttgatgtagtccagccccacgcgctgcatgtaatgcacggtgcgttccaggtagaaggcctcttcgcggtacagctggaggaaggcgaagctgtactcggcgacttccccggccgtcctgaccttgacgaagaactcgccggcctcggtcttgatgccgccgttgccgccgatgtacagctcccaaccggaatccacgccgatgatgccgacgtccttgatgccggactcggcgcagttgcgcgggcaggcggagacggcgagcttgaccttgtgcggcgagtacatgccgaacagggccttttccagctcgatgcccagttgcgtcgaattctgcgtgccgaagcggcaaaactcctgcccgacgcaggtcttcacggtgcggatggatttgccataggcgtggccgtcgggcatgtccagatccttccagacgttcggcagatcgtctttcttgatccccagcagatcgatgcgctggccgccggtgaccttgaccatcggcacctggtatttgtcggcgacgtcggcgatgcggcgcagctcggcggcattggtcacgccgccgaacatccgcggcaccaccgagtaggtgccgtccttctggatgttggcgtgggcgcgctcgttgatgaagcgcgactgcgggtcgtccttggcctcgccgggccaggtggagatcaggtaatagttcagcgcgggccggcaggtcgcgcagccgttgggcgtgtgccagtccatgaaggccatggcgtccggaacggtcagcaggtgatggtcacgaatggccttgcgcacctggccgtggttgaggtcgctgcagccgcaaatggccttctcgcttttgggtttcacgtcggcggcaccaccgacggtgttcatcaggatctgctcgaccaagcctgcgcaggacccgcaggagctggcggccttggtgtgcttcttcacgtcatcgacggaaaacaagccatgttcctggatcgctttgacgatggcgcccttgcacacgccgttgcagccgcagacttccatgctgtcgggcatggccatggccttgttctggccctggtggccggtgtcgccgatggcgccttcaccgaacatcaggtgatcgcggatctgcgccacgttgtgattttcacgaacctgacggaaataccagccgccatcggccgtgtcgccgtagaggcaggcaccgacgaggatgtcgtccttgatcaccagcttcttgtagacgccgccgatggggtcggaaagggtgatggtttccgtgccttcgccgccaatgaagtctccggcggaaaacaggtcgatgccggtgaccttgagcttggtcgaggtgaccgagccgagatagcgagaaaagccgagcatcgccaggtggttggcgcaaactttcgcctgttcgaacagcggggcgaccaagccgtaggcggtgccacgatggttggcgcactcgccaacggcatacacgcgcggatcgtaggtttgcagggtgtcgttgaccaggattccgcggttgcagggaatgccggctttctcggccagcgcgctgttcgggcggatgccggcggccattaccacgagatcggcatcgatcacctcgccatcggcgaagcgcacggcgcggacacggccctgcgcgttgccgatcagctcggcggtctgcttttgcatcttgaagcacaggccacggctttcgagcgcctgctgcagcaaggtgccggcggtcttgtccagctggcgttccatcggccattcgccgatatgcaccacggtcacatccatgccgcgcagcttcaagccgttggccgcttccaggcccagcaggccgccgccgatgaccacggcgtgcttgtgggtcttggcggcgtccatcatcgcctgggtatcggcgatatcgcggtagccgattactccgtcgagctggttgccgggaatcggcaggatgaaggggttcgaaccggtggcaatcagcaggcggtcgtattcggcctcgctgccgtcttcggcgatgacgcggcgcttggcgcgattgatctctaccaccttgcggttgagcatcaggcggatgttgtgttcggcgtaccaatcgaggtcgttgagcacgatctcctcgaaggtctgctcaccggccagcaccggtgagagcaggatgcgattgtagttggggtggggctcggcaccgaacacggtgatgtcgtaaaggtcgggggcgagcttgagcagttcttccagggtgcgaaccccggccatgccgttgccgatcatcaccagtttgagttttttcatgccgttctccgcgccgggccggcggctgattgctgcctggccatgccgttgaaaatccaacaacgaaaaaaggcgtcccactggttacccagtgaggacgcctttgtccttgtcttccgtattcggagcccggccctctacgttgaaggcccggcttgatgttgaacctgacaatgcagaggctgtgccaattctgtatgcccttggttttcaggcagttaggcggggatgtcagcgaccgatctggcagtttcctgcacccatatgatgcgcaccgcgcagcgctggtgcagtcgtgcgccgccggcagcggtaattggccgttgacagcggccgtgtcgctttttattgtttcgcccatgcgccgatttagtcagctacttgcggggcgcctggagcccaaggcttcgaaataccgctaaagcgctggttcggtgtcgcctcccaccgctgcccagcggaatcctcgaggcgggaaatccccgatgaatgcactgcaacgcgctcctctacgtctggccccgatcaccagtgggctggtccgcagcaatccgaaaatcctccttggcggcagccaccaaccctcgctgctgcgttatctcgacggctggcccaagcgctggggcaagcctcgtgcgtttctcgtgcagttcaccggtgccgatgagtcgctggcgcatttcgccgcggacagtttcgatctggcggtgatccaggcacccagccgtgagcgcctcgatgaatgcgtgcgcgagctgacgcgggttgcgcgccaaggcttgatcgttcgacgctgatcggccagccaaacggcctgcctgctaactgcctttgcccagccagaccagcaacatcaggttgagcagcagcgagagcagggcgaggccgcgccagaccttcaagggctctcgttcgagcaacggcagcgcaggcgcgttgccggtcaggcgctcgccctgttccagggtcagcagccattcttccgccgtttcgaagcgctgcgcgggctccactgcaacggcgcgcttgagcatgtcatccagccacggggacaggtcggggcggtagcggctggcagggatcgggctgccgaagcgcgggcgctggaaggcttccacctcgccgtaggggtagtggccggtgagcaggtagtagagggtgacgccggccgcgtagaggtcctgttcccggctcggagacgcgccggcgaaagcctccggagcgatatagctcggcgtaccgggcaggttgtgcggcaggtcctgggacaggcctgggcaataggccaggccgaagtccagcaggcgcagctcgccatcgtcgtccagatgaaggttttccggtttgatgtcgcggtgcaggatgttgcgccggtgcagcatgcccaacgcgcggatcaggcgcggcgccagctgcaaccagtcggccagcgccatcgggccctgttggccgaactgctgggcgagggtctggccgctgtattcgcgctgcacgtaatacagatgctgacgctggggcaggccgtgggtttctggaaagtgtcgaccggcaacgcggcgcagaaaccattcttcctgcagcagcgccgggccggcgtccggttcgtcatcgcggctgggcggcagcgttttcagaatccagggatgaccctgctgatcgctgacccggtaaaccagcgattgccgcgactcggccagcaacgtctcgaccgtccagccttcgaatacctgagccggccgcagcctgggcggcaacggccagtccgccagttgcgcgagcgagtcggccagcgccgcttctggcaactcgtcgacccgtagcagcaacgcactggcgttgtcctggctgccgctttggtgagcgaggttgaccagtgctttggctgcgttggacaggtcgggctcggcacgaaggatgttctgtaaatcgccctcggtaatgctggcccagatgccgtcggtgagcagcatgaaggttgcgccaagacgcaattcgccgtcgaggtagtccaccaccaggtgctggtccagacccatggcacgcttgagcacgtgctgcatgttcggctgttcccagacatggtcttcgcttagccgtagcagctcaccgtcgagccagcggtaggcgcgacaatcgccgacatgggcgagggtgaagcgtcgaccgcgcagcaccagcgccgtcaatgtggtcagcagtggctgcccgccaccgttggcttgcagccaacgattgtgcgccaccagcagccgatccagtgattgggcgacggtccaggtttccggcgtggcgtagtaatcggtcgccagcgcctgcaaagtggcccgtgccgccaggccgccatcggcgcattggctaacaccgtcggcgatggcgaacagtgcgcctttgctcgcggcgaggctgggcgtcggcgtgacgatgcgcagcgcgtcctgattttcttcacgagggccggtggcagtggcttcgccgaacgaaaactgcaagggcataaacagctcctaagacggcggcaggcggcaggcataacgcggtgcaggctgcgctttaggcctgaagcctgcggctgcttctaaacccgcgcggcagtcatcgccgcggaaccccaagtggttctccaacgccgcttgacgccgtagaggccgaaccaggccagcgcacccaggctggcaaacagccagaggcccatctgataatcgcccgtagcctgcttgacggcgccaagccccgcggtgagcagaaagccgccgataccgcccgccatgcccaccagcccggtcatcacgccgatttccttgttgaagcgctgcggcacgagctgaaacaccgcaccgttaccggcgccaaggctgagcatcgcgactacgaacagtgccagcgcagccgtcgagctcggcaggttgaagccgacgatgaacaggcatacagcggcgaccgtatacatcaccaagagcgaacggatgccgccgatgcggtcggccagcgcaccgcccagcgggcgcagcatgctgccggcaaacacgcaggcggcggtgtaatagccggccttgaccggatcgaaggcgtactggtcgtggaaatagccgggcagggtgctggccaggccaaggaagccgccgaaggtcacgctgtagaagaacatgaaccaccagctgtcgcggtccccgagggctttcatatagtcggcgaaggatttcggtgccggacggttcggtgcgttcttggccagagtggcgaagatgataagcaccaacaccagcggaatcagcgccagaccgaagacgttgctccagccaaacatcgtcgccagcaccggcgcgaacagtgccgcgaagacggtaccggagttgcctgcaccggcgacacccatggccttgccctggtgctgcggcggataccactgcgaggccagcggcaacgcgacggcaaaggaggcgcctgccatgcccaggaacaaccccagcagcaacgcctgctcatagctgtgcacgccgtacagccaggcgatgaacaacgcagcgattaccaccacctgcccgaacagcccggccgtcttcggcgaggtgcggtcggccagcatgcccagcacgaggcgcaaaacggcgccggagaggatcggcgtggccaccatgaaggcacgttgttgggtagtcagaccgaggtcggcggcgatctgcacgcccagcggaccgagcacataccagaccatgaaactcaaatcgaagtagagaaaggcggagaacaatgtcggcgtatggccggatttccagaaactcgtattcatcgaacacctcactagacaagagcaaccgacgcgccgaaacgggcgacggagaatgcgatgggcgccaccgactcggtgtggcgccgcgtgaagctgttgcgagccgctgtgcgttgcgggtcgcgccccggtccttggggcaaaaaaaaagcgccgcgaaccaccgtcagtctcgacggggcaacgcgacgcctttgtcatgtctgtgagtaaccgcctttggctacctgtctcgacctaagcagaagctgtgccaacagcgcgggggtgctggtttgtttggtctttaaggaggtcaggctgccggagtcgggcagcaagcgcgcagccatggtgcgcggtgcttcgaagtggggcgcatcaggcgatgcggttgaccttgggaaacttggcctcgaactcggctggcatgcgaaccacccgcgattccaggtagttgtagaaaacgaaaccggacttggccatggcgatcagcgtgccgtccgccggccgagtgatgcggaaagtgatgtcgccgccgtacgggttgaaatccatcacgccgacttcgaataacagggcgtcccgcgcgtgggcctcggctttgtaggtcgtggccaggtcggtgacgatgatgccgctgccgtccttgctggtttcggcaataccgtaggcaaacaggaaacgtgcgcgggcttcggaaatcatcgagatcatcgagtcgttggccaagtgattgccggcattgatatcggtgatgcgaacggtcaactgggtggaaaagcagaactggtcttcggggaactgcagggtcaggcgggccatggtgctctcgtcgtgctgaaggcgtggtgcggggcgttggccgaatgccggcccgacgcgggcgctgattctacgcgtccgcctggccggcccaagcatgattcaacgagttgatggcccgtaagatgttcttcggtgcgtcaggcgatgctatggcgaatgccttgcaggcgctcgtcgatgatcggcgtgatcagcgcgtagcattcggctggcgccaggctgactcgcggtgcgtcgatcaggttgcactccaggtgttcgatgaggttatgcaggctgtcgccgctgatcgggtcggtgaggcgcaggcagagatagcgcatctggatctgcatatccaacgggcacttttcgaagttggctgcgcgcaccgccaggccgcgcagacgtccgaggtcttccagtgcgcgacaggcctcgcataggccggatacctgaggattgccctggaagacaaggcgcagttcaagcacatgaatgctttcgagcagttgttcgatcaggatgcagtgcggctcgaagtccgccggattctggcggatcttctgccacagggcgcgcatcgccggacggttttcctcgcctttccactcctgccagaaccggtcgatatggctcgcaacctccaaccgctgggcggcggctgcggcatcaggttggccacccaggccacggtgtttctgcacgaattgaaggacttccagcgaatgctgcagggcctggacatcggttgcgctgaggcgcttgcgatgccgctcggctgcaacgcgactgagatggttgcctagcagcaccaggcaggcggccagggtcagggcgatcgatacttccatggtcaggcttccgtacggctgagacgcgtgagatagagggtcaggctgtgcagctctgcggcctgggtgcgttgacgctcgacgccggtttcgacctgatctagctgttcgcgcaacaggcggttgctgtgtcgctgctcttcgagggcggcttgcagatgagcgagttcggccaggctgagctgactgcgccgcgccagttgatcgagctcagtggccagtgcactgctctgctcgccgctttgcaccagcagttgctggtgctgaacgacttcggcttcgacccggcggaccgcctggcccgtcgtggcgaccacgcccgtgatgtcctgtgcggcacggtcgcttgtctgggccagctggcgcacctcgtcggcgaccacggcgaagccgcgaccgtgctcgccggcgcgtgctgcttcgatggatgcgttgagggcgagtagctgggtctgcttggcgacggtctggatactcaacgccgcgttgcccacggcagcagtgtcctgaagcagctggccgaccgcatcgcaggtgcgttgcatgctctcgcgcacctcaatcatgcgggtgctgacggtctgcgcgctatcgcgaccggcctggctttgccggtgggtatcggcaaaggcttgcatggcttgctggcccagtgtgctgacccgctccagattctggctcaacgccttgctggcgtcggtcatcgccagcactcgctcgccctggtcgatgctgctgtgctcggcggttccagccatgcgctccagggcgtcgctggcgaactgcacttcacttcgtaaccgttcgccgcgcagcgattgcgcgccaaaggcggcgaccagatcctcacgaggctcgttgagcccttgctgctggccgagcacggccagtaaatgctcgctgtggcgctgatgctcgcggcgtttgcgctgttgggtcagttgcaggcccgcggcgatgcaagcgagggccagcgacagcagttgctgctgccacagccccgccatacaggccatggcccaggcggcgagcaacagccaatccatgtacgactgcagggcggcggtggttgcgtgcggcacggcgtgcgtcgtacgtgtgccgttcaaaattctgtccatgcgcgtgatcctttttcgattaccttcctggtgcctggtcaggccgcaggccgctgctggcgctggtagaggaactccagaacctgcgcccggtaagcgtggtactgggcgtcgtgggccaggctcatgcggtcgcgcggatacttgagctcgacgcgcagaatctcgccgatggttgccgaggggccgtttgtcatcatcacgatgcgatcggagagcagcacggcctcgtcgacgtcgtgggtgatcatgatcacggtgttgcccaggtcggcgtggatctccatcagcgagtcctgcagatgcgcgcgagtcagtgcgtcgagggcgccaaagggctcgtccatcaacagcaccttgggctgcatggccagcgcacgggcgatgccgatgcgctgtttcatgccgccggagatctcgctggggcgcttatcgtgagcgtgggtcatgtgcacaaggtcgaggttgtgctcgatccagtcgcgcatttcgcgtttgcttttctggcccttgaagacctggcgtaccgccagctcgacattctcgtagcaggacagccacggcagcaggctgtggttctggaacaccacggcgcgctccgggccgggctcgttgacttcgcgaccgtcgaggatgacgccgccggtggtggcttgatacagccccgcgacgatgttcagtaccgtcgacttgccgcagccggagtggccgatcagcgagacgaattcgcccttggcgatgcgcaggttgacgttctgtagcgcgcagtagagccccttgtcagtggggaagctgataccgacgccggtgagttcgagatgggcattgttcataatggatccctcagcgcaggtctgcgtttttgtcccagctcacgcggcgctggagcatcagcatgatgcgatccagggcgaagccgatcaggccgatagcgatcaccgcgaccatgatccggccgagcgagttggagctgccgttctggaactcgtcccagatgaatttcccgaggccggggttctgcgccagcatttcggcggcgatcagcaccatccagccggtcgccagcgacaggcgcaggccggtgaagatcatcggaatggcggcgggcaggacgatgcggcgcacatgactgagcggcgacaggcgcagcacccggctgacgttctgcaggtccttatcgaggttggcgacaccgacggtggtgttgatcacggtcggccacaggcagcagagcgcgacagtcaacgccgaggtgacgaaggacttcgccatcagcgggtcttcgctgacgtagacggcgctcaccaccatggtcaccagcggcagccaggccagcggcgacaccggtttgaagatttggatcagcggattcaccgcgctgtacaccgtcttgctcaaaccgcagacgatgcccagcgggacggcgatcagcgaggcgatggcgaagccggtcatcaccgtgtagaggctggtgaagatctgctcgaagaaggtcggtttgccggtgtagggacgaaccttcacctcggcgtcggggttcttggccagcttggcggcgttgcgttcatcctgccgcaggaagaacgcctcggctttctcccgtgactggatatgtgcgtccaccagcccgttgaactgctcggccacctggctcgggccaggaaactgaccgaggctggtctggatgttcgatgccaccagttgccagaacagcaggaaggcaaggacgcccaccagcggcatgagcacctgcggtaaccagcgcttgagtcgcgcctgacggcctgctctcaaggtttctttgatgttctgcacgacggctggattgctcatcgacatgtcctctacgaaaaatgggagccgcggacggctcccgtagggcgggatcagagcgtggtatcgcctttcaggccgatcgcgaactgctcgaggtaagcgttgggcgtgcgcccgtcgtaggtgatgccatcgatggtgtcggccagcggctcgcgaatgccgtcctcgtcggctggcgggaaatcatcggcgctgagcaggccatcggagaccagctccgccgcggcctcacggtagatttcggggtggtatacgcgcttggcggtttccaggtaccagctgtccggcttggcctcggcgatctggccccagcggcgcatctgcgtcagataccagatggcatcggagtagtaggggtaggtggcgtggtagcggaagaacacgttgaagtccggcacctcgcgcttgtcgcctttctcgaactcgaaggtgccggtcatggagttggcgatgaccttggcatcggcgccgacgtactcggggcgagagaggatctctactgcttcctggcgattggcgttgttgtcttcatccagccacttaccggcgcggatcagggccttgaccagccgcttgtgggtttccgggttcgcctcggcccaagccttggaaacgccaaagaccttttctgacatgttcttgcggatcgcatagtccgccaccaccggcacgccgatgcccttgaacaccgcttgttggttccacggctcgcccacgctgtagccatggatggtgccggcttccatggtcgagggcatctgcggcggcggggtgacggagagcagcgcctgggcgtcgatctgaccgctgatgtcgcccttgttcggcgcgtagtagccgggatgaatgccgccggcggcgagccagtagcgcagctcgtagttgtgcgtcgaaaccgggaagaccatgcccaggttgaacgacttgccgctggcgttgagctgctcgatcacgggcttgagcgcatcggccttgatcggatgctgaggcttgccgtcgaccaccggcacgttgggcttcatctgctcccagatcgcgttggataccgtgatggcgttgccattgaggtccatggtgaaggccgtgatgatgtcggccttggtgccgaagccgatggtggcgccgatcggctggccagagagcatgtgcgcgccgtccagctcgccatcgatgacgcggtccagcagcaccttccagttggcctgggcttcgagggtgacgtagagcccttcgtcctcgaagaagcccttttcgtaggcgatcgccaggggtgccatgtcggtgagcttgatgaagccgagcttgagctcttccttttccggttcggtggcccgggcagccatcggtaccaactgcagcagggcacagcagctaatactggccaccaggcttttcagcaatgtacggcgggtcttgcgcatgatttatccctcaatcgcgaaacgaaaaaaggcgcaacggacgcccctctgcatgagcagagcgagcaccgttgacgcctttgtcaattcgtcccgatcaccgccgttggcgacccgaagacgtggtaccaaggtgattgcaaggggcttgccaggttctgctccggcgcggggcgcgttgaaaagtcgccgtaaaacagtgagttgcgatcgttgagctgcgaggtgtcgccagtcggcggtgcggcgagtaactaggcgcggggagcgaagttcgtgcagcacgaggcggtcgggcgcgcttttgggtcatggcgaagtgcttgcggctggctcagccaacgcatcggaccaggccttacaggccggtaggccggacattgcgtgcagtggagggcttgtcgacgcgcctttgggcatccagcggcgcggccacggtcgcaggcagagcctgctcctacagggactgcggttgcgtgagggactacagcgtagcggtgctgcgtgacggggtgggcggcgcctccgtaggagcgggctctgcccgcgacctgccaggcatcccgcggcgcggtcttgaggatccaccggcgcagccacggtcgcaggcagagcctgctcctacaggggctgcgattgcttgaggcacgtgcagcgtagcggtgctgtctggcggggtcgggtccgcttctgtaggagcgggctctgcccgcgacctgccaggcatcccgcggcgcggtcttgaggtatccaccggcgcagccacggtcgcaggcagagcctgctcctatgggcgatgcagtcttactgccccagcagatcgttcatcgcgatgatctgctcggcgacctgaatcagcttctgctggcggctcatggcctggcgacgcatcagcgtgtaggcctcttcttcgttgcagctgcgcatcttcatcagcatgcccttggccagttcgatgcgcttgcgttcgactagttgctggtcgcgcgcatgcagttgcgcacggatcgcctggtcgctttcgaagcgggccatggcgacatcgaggatgggtttcaggcgctgggcctgaatgccctcgacgatataggcgctgacaccggcgcggatcgcctggcgcatggcgtcgggattgctgtcatcggtgaacatgacgatggggcgcggttggtcgcgggtgaccatcaccacctgttccatcacgtctcggccgggcgagtcggtgtcgatcagcaccacgtcggggcgtatggcctcgacccgctcgggcagatcgatggtcaggccggattcctcgatcacctcgaagccggcttctatcagggctgtgcgcaggcggccgaccttgcgtggagtgtcgtcgatcaggaggacgcgaagcatggctgtctccctcttcaaggcttgctgatgagcggcggcgccgtgtccgctatcgcatgcagggcgaagctgcgtgcatagccggcggggtcgctgccattccagtggctgccgtccatcagcgtggcgctgcgcatcggcgagtcgggtaccgcaatctgcagcgctgtcgccgcatcgcggtagaggccggtctgctggatacgctgcgccacggccaggtagtcagggtcttcacgcaacaggccccagcgccgcagttgggtcatgaaccagagaccgtcggagtggtagggcatgttcacgtcgccgtttccgaagaaacgcagcgggtgctcgtccatccaggcgtgcccgagcccgtcctgatactggccaagaaagcgcggctcgatggcggccacgggcgcatcgagatagtcgctgccggcgatcagtcgtgccgtgctgcgccggttttccggactcgcgtcgatgaagcgactggcttccagaacggccatgaccaacgcgcgagccgtgttggggtactggtcgacgaactcgcgggtacagccgaggaccttctccggatggtcggcccagatcgattggctggtcgcgacggtgtagcccaggttttcgtcgacggccaatgcgccccagggctcgccggcacagaacccgtcgatgcggcgcgcgcgcagatgagcgaccatccgcgacggcggcaccaccagggtgcgcacgtcatcgagtggatgaatgccgtgagcggcgagccagtagtagagccagagggcatgagttccggtcgggaaggtctgcgccagggtgagcttcgcaccaccgtggcgcacgctgcggcgcagggcgtcaggatcgatcacgccagcggccttcagctcgctggacaggctgatgctttggccgttctgcgccagccccatgagcacggccatgtccttgcgcgggccgccaccgatacccaggtgtacggcatagatcagaccgtacaggccgtgggcggcatccagttcgccacccaccaatttgtcgcgcacgctggaccatgaacactgccgccggaggttgagcgtaagcccatacggctgggcgaagccctgggtggccgcgacgatcagcgaggccgcgtcggtcagcgccatgaagccaagctcgacgacgcgcttttccggcgcgtcgctgccggcgacccaggccagcggatcaggcattgcgggtgtgttggaaagaggcatacgggcaggaccttcgacaggcacgcatcgcgcggaagcgactcggtgcgaaaaaaatcatgagtcctgcgaagcaagcgacatgccaatgccctggtttcccagtgcggagcggtgtgcactgcttttttgtgggaggcccgacccggggcgaagcttttcgggcactgagctggcgccattcgccgcgagggcgcgcctcccacaaatgagggcggcgtgcactgctttttgtgggaggcccgacttcggaagcattttcagacaccgagctggcgccattcgccgcgggtcgcggctcccacaatgtgagcggcgtgcaccgctgttttttgtgggaggcccgacctcgggccgaagctttttcgggcaccgagctggcgccgttcgccgcgggtcgcggctcccacaattgagggcggcgtgcactgcttttagtgggaggcccgccctcgggccgaagctttctcaggcaccgagctggcgccattcgccgcgggtcgcggctcccacaaatgagggcgacgtggagtgctttttgtgggaggcccgacccggggcgaagcttttcgggcaccgagctggcgccattcgccgcgggtcgcggctcccacaaatgaggcggcgtggagcgcttttttgtgggaggcccgccctcggggcgaagcttttcgggcaccgagctggcgccgttcgccgcgggtcgcggctcccgcaatggtggcggcgtttatggttcttcagcgtcgcgcggtgcgctgttcctcaccgcggatacaggggcggcaacgccccgttttccggctcgccggcggttggccgtgcggtcggcaggttctgaatcgcctgccataacgcctcaccttgccaacgctggccggtctcgctgtagagcgcgccgttcagcccatccagggcgtcggatagcggaacgaagcgtgcagccatttccgccaaggtttccggttgctggcgtgcccaggcgtccagcgcgtgacgagtcgcctgggtgtcattggccagacaggcgcgtttgaggtcatcgagcaggctgcgtggcgtcgggccgctctgcaccgtacggatcaccgccggttgactgcgcgcacgcagccacaggccgaagccgagcaaggtggtcagccccaataccgcgctgctcaactgccacggccacaaccgctgcggctgcgacaaagggttagcggcagcagccgcgtcctcgagggcgggttgctggagttcggggttctcggcgacctgcagggtgcgctcgggcagcgtgctgcgctcgagccgatcttcgacggtattccaccagaccacctcggtggccggcagccgatagtcgccggcgtcgctcgcgaccaatgcctcgcgctgctcacggctaccggtgaggccgttctcggtcaccgtatcgttcagggttggctggtcggggtagcgccgcaggcctgcgacgggtggtgattcgatcggcggcaactgggcactggacaggccctctgccttgatcagcaaactgcgggtcaaggcttcgcccagctgcgcctcctgcggttgcgggctccaggcttcgaccagggtcaggttggcggcgggcagccagggtgcatccttggggtattcggcgggcttgggcttgaccagcaggggtatttccggcgatttgacctgggtggtcttgccgaagcgagacccgtagtagtccccactgggagcgaccgtggtggcgctgaacaactgcgcgggaatggtcagcgtgccgctcttttgcggatacagcgcgtagcggatctcgatcacaccgtggcgaacaccgttgatgtctttctcgtaagtacgcggttcaccgagccgctcgaccagcgcgtcgccgaactgcaggggcgacagggtgctgtcatcgtagagcgagacggaatggtagatgcgcagggtgagcaccacttgcgcctgcacgtagacgctgtcctggtcgaggctggagtcgatgaagatcggcgcgagcctgccgccaccctcggtgctggattcgctgacgttgagcatgatcggctcgctgcgccattcgcccagctgcaaaggcggaatgacgacgtacccggtccgctggggctgtaatgtaatcagccactgggtaacggcttgtgcttcaccgtaggcgctggagagctggttcgcctgacgagttcccagcacgcggaaaagcccttcgagcggttggaggtcgggtttgccaaataccgtggtatcgctggtttccaaggtcagttccacggtttcgtccaggctcagctgagtgcgatcgactcgtgcaaccagcgtcgccgcgctcgcctggcatgcgagcaggagcgttaacagcaatgtggtcagccgcgtcatcggttcagctcctggcgcttgcgttgttcgaggagaaatttgcgacgtagcagttcgccggggttgtcgggaatcctgcgtagccattgagctgtcgcctggtcctgctcgggatcggccatgccttcgcgcggttgctctggcgcgtcctgcggttcgccctgttcgggagcctcgggcggctgggccgctagcgcctctgccgcttcgttagcattacccggctcttgctgatcggatgcttcgctggcgtcgcgctggcctgcggctgggctgctgggcgcgggcggtggttccgtctgttctgggggcttctcctgtgctggttggccctcggagggctgcccctgctgcgcctcctcttcgcgctggcgcaagagggcctcgacgatggccttgttgcgacgggccgacgccaggtccgggtcgagttccagcgcctgatcatacgcctcgatggccgcctgcaactcatcgttgcgagccagggcgttgccgcggttgaagtgggccgaaggggtatcgctcttggcgaattgctcggcggcgccggcgaaatctccggccaggtagcgggcatagccttgccattgcgggtcgtcgaatcgctgcgcggcgtcggcgggacgctgcgcttgcagcaggcgcatgccttgctggtccggacgcaaccaaaggtcctgcaaggtcagggcgctggctggtggcggcatgaccatcaacaacggcaggcagaacagccagccgcgtcgtcccgcgcacgccgcgagcagcagcaggggaagcagcagccagtagccctgatccagccaggtatcgagctgggtggtgtcggcctggttcagcagctcgccgttgcgttccagcaggccgaggctgcgcagatcggtgtcatcgatgcgggcgccctgatagcgccccccgagctcggcggcgaaacggcgcagggtgcgctcgttcagcctcgggatcaggatggcgccctcgtcgtccttcaggaagctgccgtcttcctgggcgataggcgcgccttgctcggtaccgatgcccagtatcagcagtcgctgtccgttctcaccgagcgacatgccgatggcgtcgcgctcctgttggttcaggctgctggcgaccagcagcagccgtccgcgcccgttcgcgccctgttcgagcagctcgagggcgcgctgcacggccaggtccgcgcgatggccggcctccggcatgagggcgggctgcagcgcatccagcaggttctgcgtcgtggcgatgtcgttggacagcggtaccaggacatgcgcgctaccggcgaacgcgatgaccgcggtctgggcatcctggcgagcctgcaacaggtcgagaatcttgcgtttggcctgttccagccggttaggctggacatccgccgcgagcatggccggggttgtatccagcagcaccaccagcgggtcggcacgtgacagtcgaggctgctcggcttgctgccagctcggaccgagcagcgccaggcaagcgagcagccaggctgcgccgagtaccagccaagggcgcctgctgttgcgcagcctgccacgcgtgagcaatgctgcgtggaacgcctcgggcaacaggcgctgccagcgaccgatctgccgctggcggtgccagagccgccacagcaaccagatcggcaacggcaggatcaacagccagaacggccggagcaggtgtggcacgagttcggtcatggctgttctctgcgccagagaaggtgccgtagtgatggccgccagagacgatcggcgaccaacagcaggctgatcaacagcgcagccgagagtggccagacatagagtgcttcggctatacgcgcttgcgtcggttgctgcgcggtcggctcgagttcgtcgagagtcgcaccgatggcttgcagctcgtcgctcgatctggcccggaaatatcgcccgccggtttgctcggcaatggccttcagggtcggttcgtcgagctcggcgccggccaggccgaaatgctggagcacccgcccagcctgcgtgtcagcgccaatgccgatggtatgcaccttgatcccgtcgaccgctgccagccgcgcggcctgcaagggatcgatctctccgccattgttggcgccatcggtgatgagcaccagaacccggctctgtgccgggcgttcgcgcaggcgcttgatcgccagcccgatggcatcgccgatggccgtattgttgccagcgataccgacgaccgcctcgtcgagccaggtccgtacggtctggcgatcgaacgtcagtggcgcttgcagataggccttgctgccgaagaggatcaagccgacacggtcgccgcggcgctcggtgatgaagtcgccgagcagatgcttgaccagttccaggcgactgatttcttcgtcttgccagtgcatgtccgggtagtccatcgaccccgacacatccaccgccaacaatagatcacggccgctggtgggcaacggcaggggttcgccgagccattgcgggcgggcggctgccaacaacagcagcaaccagaccaccagataaggaaactgctgacgccaggcggggagggtgacggttgcacggcgaccggccagcgactcgagttcgccgaggaagctgaccttcaaggcggcgtcaccgctgtcggcggctggcagcaaccagcgcatcacccagggcaagggcagcagcacgaatatccacggccacgccagctcaaacatgcttgcgaatccatatctgcacggattgctcgaggctctggatggctttgtcatccagccggcagtcagcgcggtagacgccctcgaccagcaccatccagcgcgtcagaccagcggctgggcaacggctgtcgagaaacgccaaccaggcacgtccgctgagcgtgtggggattatcgttcgggtaacgggtgcggcagagccgtttgagcagagcgttgagctgttgcagccactggttggccggggcgccgccgtagggtttattcaactgcgcgagttcgttcagcgcgatctggcgctgaggatcgatggtcgcttcggtatcggccgcccgctcgggccgccggcgttgccagggtcgcaaacggagcaacagtatgacgctgagcaacaacgccgccaggaaccaccagccgggcgccggtggccaggcgctgacggccggcggcgcaatcaacggctcgagctggtcgagcggactcatcgctgtgctccggggtgctgcacgctgaggtgttcgcgaagttgatcgatcagatcatgctgggtgtccagcgccatcagcggcaaacgcaggcgatcggcgaggcgccgccaccgcgcgctacgggcttcaccctggctgcggtaggcctggcgtatgagcgggtcgtggctgtccaggtccagacgggcaccgaactgggcaaagcgcagcagaccggcagccggcaaggcacggtcgagcggatcgaaaaccggaaccagcagcaggtcgacgtggcgcgcgagcaaggtcaactgctgctcggcggcgtcgccgagggcgcgttcgtcacagatgatcacggccagactgccgggacgcaggacttcgcgagcacgtctcagggccagcccgaaagcgtccgggtcgctgctctgatcagcgctcaatgcggtgttggcgcgggccaaccggtcgagcaactgcagcaggctttgcttgctgcgccgaggtttgatttcgtggtgttcggcctgcccgaataccaagccgccgacacggtcgttgtggctcagcgcggcccatccgaccaagctggccgcctgcgccgcgaggaccgacttgaacgccagcccgctaccgaagaacagtcgaggactctgttccaccaggatgtagatcggacgttcgcgctcttcatggaacagcttggtgtggggctcctgagtccgtgccgttacccgccagtcgatggtgcggacgtcgtcccccgcctggtagatgcgcacctggtcgaaatccacaccgcgcccgcgaagcttcgaatgatgcaggccgaccagtgggctgcggcgatgcggggtcgagaacagcgggacttcccgaacccgatgtcgcatgtcgatcagctcggcgagacttgtgcgcacacccgccccggcagatacggcctgctggcggtcgaccggaggcgaggggggcatcaggccaccgccaccacgtcgaggatgcgctgcagcacgcggtcctgatcgataccggcggcctctgcttcgaacgagaggatgagccgatggcgcagcacatcgaacagcatggcttgaatgtcttcgggacttacgaaatcgcggcccgcgagccaggcgtgggcacgggcgcagcgatccagcgagatcgaaccgcgaggactggcgccgtaggcaatccaacccgcgagctcggcatcgaacttggcgggggtgcgggtcgccatgaccagctggaccaggtattcctcgaccgcatcggccatgtacaggccgaggatttccttgcgagcggcaaagatggcttgctgcgagacccggtgctcgggcggggtttcgccgttgatggcttcgccacgcgcctgttgcaggatgcgtcgctccaccgaggcgtccggaaagccgagcttcacgtgcagcaggaagcggtcgagctgcgcctcggggagcggataggtgccctcctgctcgatcgggttctgcgtggccatcaccagaaacagcggtgataggtcataggtgctgcggcccacactgacctgacgctcggccatcgcctcgagcagtgccgactggaccttggccggggcgcggttgatttcgtccgccagtaccaggttgtggaagatcggcccctgttggaagacgaagctgccggtttcgggtcgatagatctcggtgccggtgatgtcagcaggcagcaggtcgggcgtgaattgaatgcgatggaattcagcttccaggccgccggccagctccttgatcgcccgtgtcttcgccagcccgggggcgccttccacgagcaggtggccatcggctagcagcgcgacgagcagccgctccaccagccgttcctggccaagaatctgggttgaaagaaactgtcgcagcgcgactatggcttcacggtgatccatcgttgaactcttctacggaggcgtgtcggggcgattgcccgacggcgacgactttaattcatttgccagatcgcagccatgcgcggctcggcaacttggctggcgtatggcgttttttcttgccacaggtagcggcggcagccggcgagctggcggccgttcgggcagattgaaagacggcgcgcatcaattggcggccatgcctgaaagaaatgtgactgctgcgtcattggcggcgccagagaagggtagggctgcgttcatgcaatcactgttttgctggactaacgtggaacttacacgttgcgttgccagtcaggtgccgcgactgccttagtcgaattccaagccagaatggagcgaaaaaatggcgttctttacagctgccagcaaagccgactttcagcaacaactgcaagtggcgttggcgcagcatgtcgacgagaaactcctgccacaagtggggctcttcgccgagcaattcttcggtatcgtcgctctccccgagctgacagagcgacgcatgactgacctggtcggctcaacgctggctagttggcgccttctggagcatttcgacccgggcagcccggacgtgcacgtgttcaatccggactacgaaaaacacggctggcaatcgacccatagcgtggtcgaggtgctgcaccccgacatgccgtttctggtcgactcggtacgcatggagctgacccgccgcggctatgccatccatacgttgcagaacagcgtgctacaggtgcgccgggacgccgacggcagcctgatcgagctgttgccaaaaggcagcgccagcgaagggagccaggccgaatcgctgatattcgtggagatcgatcgttgcgccagcgccgcagccctgcgcgagttggagcagtcgctgcacggtgtcctggccgaggtgcgtctggccgtcagcgatttcccggcgatgaaggcgaaagccgaagaccactacacccgtctgggtacgctgcagctggccgacgcggccgaattgtccgaaagccgggatttcatgcgctggctggctgacgatcatttcaccttcctcggctacgaggagttcaccgtgatcgatcagggtgacgggggccgcatcgtttacgacgaatcctcgctcctgggcctgtcacgcatcctgcggaccgggctcgaggaagacgatcagctgatcatgccgccggccttggcctaccttcgcgaaccgctgctgctgtcgttcgccaaggcggcgacccccagtcgggtgcatcgcccggcatatccggacttcgtctcgattcgtgaattcgacgagcagggccgcgtggtccgtgagtgccgcttcctcgggctgttcacctcatcggtctacacccagagcgtacggcggattccctacatccgcagcaaagtggcggaagtggtgaggcgctcgcagttcgacgattcggcgcacctggccaaagagctgatccaggtgcttgaagtgctgccgcgcgacgaactgttccagatgacgctcgatcagctgttcaacaccgcgattgccatcgtacagatccaggaacgcaacaagctgcgtctgttcatgcggatcgacccctacggccggttctgctactgcctggcctacgtaccgcgcgacagctactcgaccgagacccgtctgcgcattcagcaggtcctgatggatcgcctggaagccagtggttgcgaattctcgacctacttctccgaatcggtgctgatccgcgtgcagttcctgctgcgcctggacccgaacaagcaggtgcagttcgatccggtacagctggagaacgaggtggtgcaagcctgccgcacctggcaggacgactacaccagcgtcgttatcgaacaattcggcgaggctcagggcactggcattctcgccgaatttccgaagggctttccggctggctaccgcgagcggttcgccccgcattcggccgccgtcgacatgcagcacgtgctcagcctgagcgaagagcgtccgctggtgatgagcttctatcagccgatcaccgccatggagcatcgcctgcattgcaagctctaccacatgaacacgccgctgccgttatcggacatgttgccgatcctggagaatctcgggctgcgtgtgctgggcgagtttccgtttcacctgcgccgcaaggacggccgcgaatactggattcacgatttcgcctttacctatgccgaagggctcgaaatcgatctgatggagatcaacgagccgctgcaagatgccttcatcgccattcacaatgggcaggcggagaacgacgccttcaaccgactggtgctgacggctgggctgacctggcgggaggtggcgctgctgagggcctacggccgctatctcaagcagattcgcatgggtttcgacctgggctatatcgccagcgcgctgctcaaccataccgatatcgcccgcgagctggtgcggctgttcaagatgcgtttctacctcgcgcgcaagctcggcgaggaagacctggccgacaagcaggcgcggctggagcaggcgatcatcaccgccctggacgacgtcgcggtgctcaacgaggatcgcatcctgcgccgctacctggcgctgatcaaagcgacgctgcgcaccaacttctaccagagcgatgccagcggcaagccgaagagctacttcagcttcaagctcgatccgcgttcgattccggagatgccgcgcccggccccgaagttcgagatattcgtctactcgccgcgcgtcgaaggcgtgcacctgcgcggcggcaaggtggcgcgaggcggcttgcgctggtcggatcgcgaggaagactaccgcaccgaggtgctgggactggtcaaggcgcagcaggtcaagaatgccatcatcgtgcctggcggcgccaagggtggtttcgttccgcgccggctgcccaccgggggctcgcgtgatgaggtgctcgccgaggggatcgcctgctaccgcatcttcatcagcggcttgctggacatcaccgacaacctcaaggatggcaaggtggtgccgccggccaacgtggtgcgttatgacgaagacgatccctacctcgtcgtggcggcggataaaggcaccgcgaccttctccgatatcgccaacggcatcgccgccgagtatgacttctggttgggcgacgcattcgcctcgggcggttcggcaggctatgaccacaagaagatgggcatcacggccaagggtgcctgggtgtcggtacagcggcacttccgcgagcgaggtatcgatgtccagcgcgatccggtcagtgtgatcggcatcggcgacatggccggtgacgtgttcggcaatggcttgctgatgtccgaaaccctgcagttggtggcggccttcaaccacctgcatatcttcatcgatccggaccccgatgcggcgcgcagcttcatcgagcgcaagcgcctgttcgacctgccgcggtcatcctggaccgactacgacccgtcgctgatttcggcaggaggcggggtgttcccgcgctcggccaagcgcatcgcgattaccccgcagatgaaggcacgcttcgagatcgaggccgatcaactgacgcctgcggagctgattcatgcgttgctcaaggctccggtggatctgctttggaatggcggcatcggcacctacgtgaagagcaccaccgagacgcacgcggacgtaggcgacaaggccaatgacattcttcgggtcaatggcaacgagttacgcgccaaggtcatcggcgagggcggcaacctcggtattacccagctaggacgggtcgagtactgcctccacggcggcgcggcgaacacggacttcatcgacaacgccggtggtgtgaactgctcggaccatgaggtcaatatcaagatcctgctgaacgagatcgtcagtgccggcgacatgaccagcaagcagcgggacaagctgctgttcgacatgaccgactcggtgtccgaactggtgctgcacgacaattacaagcagacccaggcgctatcccaggccgaacgtcgggcacgtgaaggcggcggcgaatacaagcgactgatcagcgcgctcgaagctgacggcttgttggatcgagcgctggaattcctgcccagcgacgaggcgcttgccgaccgcgccacgctgggcaaggggctgacccgcgcggaactgtcggtgctgatttcttacagcaagatccatctgaaggaagccctgttgcagtcccgggtaccggatgacgattacctggcgcgcgaaatggaaagtgctttcccgcagctgctggccgagcaataccgcggtgcgatgttgcaccaccggttgaagcgggagatcgtcagcacccagattgccaacgacctgatcaacaacatgggtatcaccttcgtgcagcggctgcatgaagcgacgggcttgagtgccgccaacgttgccggtgcctatgtcatcgtgcgggacattttccatctgccacattggttccgtcagatcgaagcgctggactacaagatcccggccgagctgcagttgaatctgatggaagagctgatgcgcctggggcgccgggccacccgttggttcctgcgcaatcgacgcagcgagctcgatgctgctcgcgacgtcgctcacttcggcccacgcgtagcggcgctcggactgaagctcgatgccttgctacaaggggctacacgcgatctgtggcaggcacgctacgagcgctacaccgaggcgggcgtacccgagctgctggcgcgaatggtggccgggaccaatcacctctataccttgttgccgatcctggaagcggccgacgaaaccggccagccgccggctgatgtggccgcggcgtacttcgcggtcgggggcgcgctggagttgccttggtatctgcagcaggtcaccagcctgccggtggataacaattggcaggcgctggcacgcgagagcttccgcgatgacctggacggtcagcaacgcgccatcacggtctcggtgctgcaaatgagcgacgcgcccgatggcttggatgagcgggtacagctgtggttggagcagcgggcgtaccaggtggggcgctggcggcggatgctggtcgaactgcgtggcgccagcagcgtcgactatgcgatgtatgccgttgccgggcgtgagctgcaggatctggcccaagacagcgcacgacgctagtgcgctaaggcccccggtgctgcccgggggctgtcgatagctagagaaacgccggcgcatttgcaccggcgtttggttttggcgatctgcggcgtcaacgcttgccgatcggtacggattctattggcggcgatcggccagcgcggatcagtcggtctgcgctgcccggttgccgagacggaagcgcgtgatctgcggcaggtcacgcagatagcgaatcatgtccggtgcgccagcaagcttgaggccttccccgagggcgttggcggtggcatggcgcttgtcgagcaggagcagctcggagttgtccgggttgcgcagcaaggtcagacgggcgtaggggatcttcgcatcgagcaacaaccccatgaactcgcggtcattccaggcttgcgccggcatggtcaccgcgtggtattcgctatccagcgcatgcaggcccggcgcatcgagccggtaatcaaccagttcgcagggcaggttcacttcgagtccgcgtagccgcgcataggcgacggcgcaggcgaaggcttcggcgtgatgctcgcccgaccagtagatgcgctcgccgagccagctggcctgacgaagctctatgggggcctgggtctcgaagccgggcagggcggtcgagagggtgcggacgaaatccttgtagctgatcacacgcagcttccggcatgccggggtggcggcgaaggcttcgaaggtcgggtatgtctcgccgctggtgttctgcccgctgagcccgtctatctggcgcagatccagcgccgcgtgcgtggtctcttcacgtcgtacgagccgcgtcaaggcggcacgtgccttggctttgtcttcctgaaccgggccggaaagggcgcttctcggtaggtcgacgaagcgctgcaggcaaggtccgtcgtgccagaagatgctcggcgccggctccaggagcggcgcgaagggcagtcgcagctggctggccaactcgagcaactgacgcggcgatttgccggccaggccaaggcgttgggcaaatttgacgattcgggaagtcacgggcggtaccggctcgggcaggttcatcattgcggacgaccgtttggaacgacgagggaagtgtggcagagccgccgacgctgtgcacagtgtttaccgagcttttgctcgcgcatgagcggcggcagggcacaacgggcaaagtatccgtatggcaaaatcgctgtgctgatcaatgaggagcctccatgccaagcctcgtgctggatattgcgctaccggcggaaaaactgctggcagtttatcaagggcgcgccaatcgtatcctgatcaagagccgggaggggacgagtgtcagcctgccggcacatcatctgcgaccgtttctgacaagtgccggcgtatttggttcattcgaattggaattttctccggagggcaaactgctccgcttgcggcggctggtacacgcgcgttcccagtagcggtttggcccgttggtcatcacgttcgcccgctggaactggcgccgcctgctatactcccgcgccacactctacccaggatcttaggctgcgtatgtataacctggcccgccagctgttgttcaagttcacccccgaaacgtctcatgagctatcgctcgatctcatcggtgcgggcggccgtctaggactcaatgcgctgttgaacaaggcgccggctacactgccggtacgggtgatggggttggattttcccaatccggtggggctggcggccggcctggacaagaatggtgaggcgatctgcggcctgtcccagctggggttcggcttcgtcgaagtgggcaccgtgacgccacggccacagccgggcaatcctaaacctcgtattttccgcttgcccgaagccgaagccatcatcaaccgcatgggcttcaacaaccacggcgtggacgctttgctggagcgggtcgacgcggcgcgcttcaagggcatcctgggcatcaacatcggcaagaatttcgatacgccggtcgagcgtgcgcaggacgattatctcctgtgcttggacaaggtctatcaccaggccagttacgtcaccgtgaacgtcagctcgccgaataccccggggctgcgcagcctgcagttcggcgactcgctcaagcagttgctcgacgcgctcgcgcagcgccgggaggatctcgaagtgctgcatggcaagcgtgtaccgctggccatcaagatcgcaccggacatgactgatgaagagatcgcgctggttgccgaagcggtctttcaggcgggaatggacgccatcatcgcgaccaacacgacgctcggccgcgagggtgtggcggggctggctcatgcggacgaggcgggtgggctttcaggtgcgccggtgcgcgacaagagcacccacaccgtccgcgtattggcgcagacgctggcggggcgcttgcccatcatcgcggtaggcgggatcaccgaggggcggcatgcggcggagaagatcgaggcgggggcaagtctggtgcagttgtacaccggcttcatctacaaggggccggcgctgattcgcgaggcggtggatgccgtggcgtctctgcagtcgagaaggaagtgacgcgaaggaaatgattggctgcctggtggggctccctgagggagccccgggcttaaagcccgccgcccgggtggggcgtgccagatgaagtcggtgtgatggtgtcagccgactgcgtggagttcgttcaatcgatgaaggccggccgcgccggtcagaccgtcccagttgtcgccgcgaccctcccgccagccgttaatccaggcttggcgcacctccggatgggaaaaaggacatagatcgcgagatttaccgtgtatgccatgctgataaccgcgtagaaatgctcgttccatcggatcacgcttgagtcttctcattgggtattgccctcagtggttgactggtgttcctgttgacctcatggcgagatcggcagatagactgccagcgaagccccgttgccggcgtgacggggttctaccgggcatcgttgcgatgccggtctgtgtcgagttctaacccaaatgcttcgggcgcgggaatgatcgttttgtaataagcaagtaaccaaaccgtggtgctgcccataaggcgcgtgagacgtgctctcgctgccgcctcggcacgctacgttgcattagcttctcgccgaaaacggtcgaagccgtacccctatcgaaatcggatccgcacgcgctgccgcggggatcgaatactctggaaatgccatgactgatcgccacgaactcatcctcacctgtcccaaggggctggaaggcctgctgctcgacgaggccgttggcctgggactcgaggaggcgcgcgagcagaccgcggcggtacgcggcttcgccgccatggaggtcgcgtatcggttgtgtctctggtcgcggctggccaaccgggtattgctggtgatcagtcgtttcgccacggtaaatgccgaaaccctgtacgaaggtgtccaccagttggactggtccgagcatctcgaggccaccggcagtctggccgtcgaattcagcggccatggttcaggcatcgacaacacccactttggcgccctgaaggtcaaggatgcgatcgtagaccgtcttcgtacggccagtggggatcgccccagcgtcgataagctcaatcctgacctgcgtgtgcacctacgcctggatcgtggccaggccgtgctgtcgctggacctgtccgggcacagcctgcatcagcgcggctatcgcctgcagcagggcgctgcgccattgaaagagaatctcgccgcggcggtgttgattcgggccggctggccgcgtatcgccgctgctggcggcgccctcacggacccgatgtgtggcgtgggtacattcctcatcgagggtgccatgatggcggcggacatcgctcccaacctgcgccgcgaacgttggggcttcagcgcctggctgggtcacgtcccggccttgtggaatcgcctgcacgccgaagcgcagcagcgcgccgaagcgggactggccaaaccgccattgtggattcgcggctacgaagccgacccccggctgatccagccggccaggaacaatatcgagcgcgccggcttggcgaactggattcgcgtctaccagggcgacgttgccaccttcgagcctcgcccggatcagaatcaaaagggcttggtgatctgcaacccgccttacggtgaacgactgggcgacgaagcgagcctggtctatctctatcagaatctcggcgagcgcctgcgccaggcttgcctcggctgggaggcggcggtgctgacctcggcgccggacctgggcaaacgcatgggcatccgcagccacaagcaatacgccttctggaatggcgcgttgccgtgcaagctgctgctgatcaaggtcgagctcgatcagttcgttaccggccaacgaacgaactccacggagcgcaaggacgagcaggagcccgtgcaggaactggcgcgcctcagtgaaggggggcagatgttcgccaatcggttgcagaagaatctcaagtcgcttgggaaatgggcccgcaaagccggcatccagtgctatcgactgtatgacgcggacatgccggagtacgcgctggccgtcgatctatacggcgactgggtgcacgtgcaggaatatgctccgccgcgttcgatcgatccggaaaaggcccaggcgcggctgtacgatgcgttaggtgcgattccccaggcgctgggcgtttcgcgcgatcgagtagtggtcaagcggcgcgagcgccagagcgggacacgtcagtacgagcgccaggccagtcaggggcagtttctcgaagtcagcgaaggtaacgtcaagttgttggtgaatctcaccgactacctggacaccggcctgtttctcgatcaccgcccgatgcgcctgcgtatcgcccgggaggctgccggcaagcgctttctgaacctgtattgctacacggccaccgcaaccgtgcatgccgccaagggcggtgcgcgtagcaccaccagtgtcgacctgtcgaaaacctatctggattgggcgcgacgcaatctggcgctcaatggcttgtccgatcggcagcgtctggagcaggctgatgtgatgagctggctggaagaggatcgcggcgagtacgacctgatcttcatcgacccgccaaccttctccaactccaagcgcatggaaggcgtcttcgatgtccagcgcgaccatgttgcattgctcgacttggcgatggcgcgactggcaaccggcggtacgttgtatttctccaacaacttccgcaagttcgtgctggatgcgggcatcgccgagcgctatgccgccgaagagatcaccggtgccacgctggacgaggatttccgtcgtaacagcaggatccatcgcgcctggaagcttcaggcgcgatgatcggcggccgcgccgcaactggcgtcgcgccttgtcgataagccaaggcgcagacgtgaacagcggagctcgtggatgaactcagcgaaggtgttctatcgctgtgccgtgctggtgttgtccggccggttatagaggctgaccaacacctgatccagcaccgaggatgctccccatggccgtggatggttgaggatcgcgacgaccgcccaggtattgcccgcgccgtcacggctataacctgcgatggcccgtaccgtgttcagggttccggtcttgatgtgcgccttgccggccactccggtgttgcgcaggcgcttgcgcatggtgccgtcgacagccgcgagcggcatcgatgaaatgaactccgcggcataggggctttgccaggcggccttgagcaaggcggccatctcgcgcgcactcacgcgctcggcacgagacaggccggatccgttctcgatcaccagatgcggtgagatcaggccctttttcgccagccactgccgaatgacccgctgcgcggctttcgaatcgtcggcatccgtttcgttacgaaacgctgcgcccaggctcaaaaacagctgccgtgccatggtgttgttgctgtacttgttgatatcgcgaatgatctcgaccagatcgggcgaataggcgcgggcaaccattcgcgcatccttcggcacctgggcgacccgatcgccgcccaggatattgccgcccagttccttccagatcgcccggacggcgccggctgcgtaatgctgatggtcgagtagcgatagataggtttggccgctacagccggcggcgagtttgccggtcgccaccacggtaacgccgtcggcatcctcgatggggttgtagcgaatgtccggccagccgggacacttggccttgggcagcgcctgaatgcggttatcgatacggactgcggcgattggaggctcgaccgcgacgtctacctgcccattgtcgttgcgcgcaatgaagcgaagtgccttgaggttgaccagcagcgagtcggggccaaccaggaagggcttgttcttgtcgttgccatcgtcatcgaaaacgggcagtgacggctggacgaaatggctacggtcgagcaccaggtcgccggtcacggtttgcacgccattggcgcgcaagtcacgcagcagcagccatagcttttccatgttgagcttgggatcaccgccgcccttgagatagaggttgcccttcagtgtcccgttttcgatcgggccgtcggcgtagaactcggtcttccattgatggttgggacccaacagttccagcgcggcgtaggtcgtgaccagcttcatcgtcgaggcgggattgaccgatacatcggcgtttatataggtcggcgatgcattgctattgagtggcagcatcacgacggacagggcgctgctctcgatcttgttcgctttgagcgcctgagcgacccgcggcggcagcgtttggttgatcgcgtcggcgaagaccgggaaagccagcggcagggtcagcgaggcgatggcgacacgaccgaaaaacgtgctcatgacaccgcgccgaaaggcagcggcacgcaaattggaaatcaacgacatgaaagttccctacagcgttcagggaaaaatgacgggccattatgcccacgtccgagaagtgacgtacttctcatccgacaagcgtagccggggagtgtgggtttcagcaaaaaaacaaaaccatacggtatcgaggcctgatccgaccgacgcctgtaatcgcacaagtgaggcgttgctgttagagtgcgcgccgtcatctcgttagaaaaaggaccgattcaatggctaccaatcgctcgcgtcgcttgcgcaagaaactctgtgtcgacgaattccaggagctggggttcgaggtcaatctgacctaccgcgacggcatcgaagccaaggctgtggacgacttcctggaagcgttcctgaacgaagccatcgaggccaacggcctgggttatatcggcggcgaggattacggcttcgtgtgtctggccagccgcggctcggtcaacgaagaacagcgtggtcaggtcgaagcgtggctcaaagggcgcaacgaactgtccgagttcaacgtgagcccattgatggacgtctggtatccagagaacgagatcaacgctaaggcgtgatcgagtcattgtttccctgatcggttgcagtgtttcgcccggatctacgcaaggtaattcgggcgatcaaccggcgtagcaggcacatcaacagggtcacgcccagcgccacgctcaccccgatggcggcattgatgaggcgcagctgcggaagatcccagtcttgcgcgagcgtttccgccagcaatacgaaactcaacgtcgtctgtaggacgaaaagcccgtagtgatgtgcctggaaggcccggctgagcatcaccagtggcagcatgatcatcaccatcattggcggatcggccaaactatggcccatgtagatcagtaccgccgctgcgcagaagatcccgaggctggcttgtagggcccgtgtcaggctgcgttgcaaatccatttgcaaggtcgtgaagacggccagggtcagccagtagcccctgggaagctcgccaagcgtcacgatcaggccgccggtggcagcggcgagtatgtaggccagggcatgcagtcgccattgcctaatcggtgtacgccgcgcgcggcgccgcagtactttcatcaagctcagcagccgtggcatgtacggccacatacgtaagccgtgcatgccacgcaggccgaaggcgagcagggtgacccaaagcccgcctagcgcgaaaagcacggcaatagcctgaggattgttgaagtcaccgatgccgtgctggccttggccgaggcacaggcagatggccagaccgattccgagcttgccggcctcgctgccatagcgctgcagccacgccaacagcagaccgtagaaggcgaacaggccgaggctgatcagcggatgcgtcgccgaccagaagccgagcccggcgctgcctgcgcctagaccgatcagcagcaacatccgtagcatgccgagccggtgcagcgggttcgccttggcggcctggaaagcgccgaccgtggcccaaagaaagccggcatgaccgctgaacaagccgagcaggagcggcaatgcacaacccaaccctgcaacagcggcggcaccccaggcggggcggccgggctgccagccgacaactttccagaatggcttcttcatcaatttcacgtcgggctcgagcgtccggtcatttcgccggccatttcggtcgcgtagctgtcggtcatgccggcaatgaagtcgatgacccgcacgaaggactgatacagaggccagtcggctttcggcgcgttaccgccaagcaggtccaatatacggcggttcttgaacgaccgctcgcgtccgccgtgctgctccagtgccgcaccgcagaaggcgttgagcaaaatttcgagggtggtgtaagcgccgatttcatgcagcgtcttgcgcttgtcctggaagatcttttcccgcgccatggctttggcttgcaacacacacttcttcgcagggccatgcatgtgctcgaccagatcgccggtcagtgtgccggccagaagggcttgctgttgatccacgaacgcccgtgccgcggcgttggtcaggtgctcgatcgccttgcctctgagaatcgccagcttgcgtcggcgtgagtctccgggcccgagctggcgataggtttccggcagatcgtcaccgaccagattcagcagcagagcttcgacctcgctgtaatcgagcaggtccatttccagcccgtcttcgaggtcgatcaggccgtaacagatgtcatcggctgcttccatcagataaaccagcgggtggcgtgcccagcgctgttcgtccagcttcggcaagccaagctttgcggcgatctgctcgagcagggctagctcactctggtaacaaccgaacttgtgtttcttgtaaccgagcgcctcggcatggcgcgatgtccacgggtatttgaggtaggtgccaagcgtcgcataggtcaggcgggtgccaccgtcgaactggtggtattcgagctgggtgaggaccctgaacccctgcgcattgccttcgaagttcaggaaatcggcccgctcggcatcgctcatgtcgtccagccagcccctccgtgcagcttgctggaaccaatggcgaatggcgtcctcgccggagtgcccgaacggagggttgccaatgtcgtgagccaggcaggccgattggataatcattccaaggtcggccggggtgcaccattcgggcatttcatcgcgtagcacttcgccaacgcgcatgccgagtgagcggccgacgcagctgacttcgagtgagtgcgtcaggcgtgtgtgaatgtgatcgttgctggaaaccggatgcacttgggtcttgcgcccaagccggcgaaaggctccggaaaagatgatcctgtcgtgatccttgtgaaacgggcttcgaccgagctcttcattgctgtgaacggatttaccgagacgttcacggttcagcagggtgtgccagtccaaagagcaacctccttaatgtcgccagcaggcaagtgcgccaaacgcggcatcatgagcagcaacaactgcaacggcgtgtcatgacacatgcgcaagccagcctacagcagttggtggctgccgtgccatacacctattgtgcaggcgggccccgcgtcgttgcagcgctgtcgcttcgccactgcgctagtgccgcaatctgttcacgatcggataaagcatgaccccgagtcgggccaatttaccgaacttgcccagacgtcgtccgaagagcatcagcgccaggctggttgcaatcagcaacggtcctttgcgtgtatggtcatcggactcggcgtttcggtgggcaatcatccctttcattcgctgaaagggatgagccaaaggctgcgagtgatagagcagctgctggcgattcatctccatgcgcagacggacgagatccttgcgcatggccagatcgctggaggtgctgagaggaaggctcatggtagtaaacgctcccggttgcgtgccaattcttcgaccgtggcctggaacggcgaagcgctttccttggcgaggtgggttgctcggctgatgcagatcaccagcgcgatggcatatagcgcgcagaggatgagaatcgcggctattggattgctatcccagaaggcaatcacaatcgcagcggagagccccaccagaatcaacaagccgagtatcaggctgatgctggcgagcagaaacagcttgaacacccgcgtgcgttcttcctggatctcgatcccgatcagctccaggtgcccttggacaagccctgcgagggcgccgcccatcttcttgatggaaggggccggagcctcatcgttgtgcttggtttccattggttccgttccccacatcagcggcgggtgatcaggccgaagagaaatccgacgcctgcagcgattccgatcgactgccatggatgggtatgaacgtactcttcggtgcattgaatggccgcttggctctgctcacgcagcgtcccttcctgttccttgagcatctggcgggcgcggctcaggttggcgttgatcttgcctcgcagctcctcggtctgagtgccggcggtgtcctgcgtgtgcttcagcaggcgctcggtgtcaccgatcaaagtatggaactcttcgatgagtgcgttctgggcagcttgtaggttacgacggtgcgcggacttatcgaacaaaggtgcggaggtaccggtggacccatcggggatgggcgtttcgtcactggtgccaaaagtggactcgatagacatctgcagctccttttcagtctcgctgggacgaagggtcccagtgcctcaagtttcgagcacgctgatgacgcaaggttcccgcttcgtttgccccgtttttttcggctgggaaagttgcaagcgacgtcatataggcacggctttggctgagtggcagctgagaaaaaagaaaacccgccgaagcgggtttccttgatctactgcaaatgcaagtagccgctattacatcagcgggatggtgtagctgacgatcagacggttctggtcgatgtccttatctttgttattgctgctgcgataagtaccgttacgccatttcacgccgagattcttcagggtgccttcctggaaaacgtagccgatgtcggtgttacgttcccattctttgctatccccgcctgcaccgaagttatcgccagtcacatagcgagtcatgaaggtcagcccaggaatgcccattgcagcgaagttataatcgtaacgcgcttgccaggatttttcgtctgggttggcgaaatctgcagacagcattacatagttgaccaggtagggatcggtactggcaccggtgtaggcgaagccagtatctccgctcatcttctgataccccaatccgaagctatgtccggtgatggagtatgtgaccattgcccctaaagctttgttgtcaacggaggaagagccatcgtccgtcgaacgtgcatagcgcaagtcggttttcagagattggtcttcgccaagcggcaggacatggatgaggttgaatgaatgctgtttgtagacttcttcaagattgctgtagtaatacgcacccttcaggtccttcgtgaaggaataggtagcgcccgcgaagaggaagtcgtcaggcttgtcgccagtatccccgcccttaccgctgaacttcagatcttcgtaattagtggagtcgcggtcgttttcttcggtcaggtaaccggcgtccaaggtgaggccgtcgatctcgttggagataatttgaccgcctttgaacgtttgcggcagcaggcgcgagtcgctgcgcgagatcgccatgttcttcggttcgatcgtgccgactttcagtacggtcttcgaaatcttcgctttggcagtcacacccagcgacgagaagtcgtcaggggcttcatttccaaaggagctgggcatcaggcccgtgccagcggtgtcttcgctggaatacagcttgagacccataagacccagcgcatcaacaccaaagcctacagtaccttcggtaaaacctgattcggcgcgaagaatgaagccctggccccattcttctgacttggattgcttggtggacgggacggagcggttgtcgctgttgtaatagaaattacgcagttccaagttgactttactgtcgtcaacgaatgcagcctgggccatggtagggatggccagtgttgctcccagagtggctagggccacgccccgggcgattggggtcttgagcatttcttatttctcctcgttggatgatgctctgaagtcgctcttacggcgccatgcaataaagcactacataggtattcaagcctttagaccttagtcgttgaggctcaagtaaggtatgccgtggcatcgctcggtaacgtagctgcttcactcgatacatcatcaagcaattgccgccaagcgcacatacacacccggccctgcagctcttcggccgcttgggttgccgcatcctagcggtttgaaggcgttacgtcgattccctaaatcaaaccatcgtttgagtgcgttcaaggtcacacttttcgcaacggccaggccgaaagtagtaggccggtgcgcgacagcctcatcaagacaagcctgctagaattgctgagccagtttcgatgagccctacttatatatgcatcttcctgaatgccaactgtttggaacgctgggttgccacctttgcgagcaggccgaggcagtggtcatgccactggtggaacatgggctgttggtggaactgctggatgttgcagacaggcccgaatgggtcgacgactatgggttacgcatacccgtgctgaaaagaatcgacaccggcgcggaactggactggccattcgaactggaacaggtcgtctggttcttgcggcaataggaagcagggcttttgcctgagaatgcagtggctcggagatggcagcccttgcgtggtgaagcgggcggctagtcgctggcaagcggtttagaacgtgggcttaaaacgaaaaaaccggccagtggccggttttttgatatcaggcttatcgcgctgatctcgggatatggtcggagcgactggattcgaaccagcgaccttctcgtcccgaacgagacgcgctaccaagctgcgctacgctccgaagatggcgcgcattttacagaaaaacttttgcttcacaagagcttagtagacgctttttgcgtagtgccaggcagagcgcttggcaccgcgcaatccggctcgttacagctccttgacggtgcggacctggtccttgttgactcgtcccggcttgccgtcgaggccttcgaattcatagaagccggcctcttcatcgtagtcagggcgatcaagcgtctggatttctcgaccatcgttgagcgtgatgacgctcgggctcgagcagccagccaagagtgtcagtccgatcattaacgccagggcgggtgcggttgctgcgcgcatgagcattctcctttgagtgatgcgtctgtgacggcggtcgtcggcgctaagttcccggcggagggaggtgctcggcaagcaggttgggtgagttcaaattggccagtcgagtatcgtgctggtcgatctcaagggcgcgggcatgcagcgcaagcagaacgttgcggttgcttcgctcgccggcctgccaggcttgctcgaccgccgaagcaaggctgaccgggatgatgcagaacagcggctcccattgtgcgcctcgccggagcatcactggcttgtccggttccgctacagccgtccggtacagttgagtgagcagcgcctcgtcgatcagcggtgcatcgcagggcaccaccatgagccacgaatggcgagccgcggacaggcctgctcgtatgcccgtcaggggtccggggaagtccggttcgttgtcgcagaccagctgatcggcgaaggctgagtaacgctgctggttgcggttgcaggagatgagcagatcatctgtcagcggacgtgcaaccctataaggccaggccacgagcggctggccgtgccactccaccatgcccttgtcgcgtccgcccattcgctgtccgcggccgccggccagcagcaggatcgagcaatccgctagcccttgtcgttgcatcaagtgctcctttcaaagcctgtgatataacacctcggaactgaattcaccaatcgggaagcctgtatgagccacctcgctgatcaatccttcgttccgttgaatatcgccgtcctgacggtcagcgacactcgctcgctggagaccgatacctccgggcaactgctcgtcgatcgtctgctggctgccgggcacaggctcgcgtcgcgggtgctgctcaaggatgatctgtatcggattcgggcgcaggtcgcgaactggatcgccgaggatgaagtgcaggtggtattgatcactggcggaactggattcaccgcacgggatagcacgccggaagcggtggcttgcctgctggacaagcaggtggatggctttggcgaactgtttcgccagatctctgtaagcgatatcggaagctccacggtccagtcgcgcgcgctggccggcttggcgaatgccaccttggtttgttgcctgccgggctcgaccaatgcctgtcggaccgcctgggatggcatcctcgccgagcagctcgacgcgcgtcatcgtccttgcaacttcgtgcctcacctcaagcaggccgcgcactgcgagagtcgctcctgatggtgggcgaggcgcaggcgctgatgcctgtggagcaggcgctggacgcgctgcttaagcaggcagaggcggctccgatcacggatgtcgagcgcgtgtcgatcgacaacgcgcaggggagggtgttggctgaatcgctgatcgccacgctggatctgccgccgtggccgaacagtgcgatggatggttacgcggttcgttcagcagatcttgacgggcagccgttacgggtttcccagaagatctttgccggtgcccagcccaaaccgctggaaccgggttgctgcgctcggatttttaccggtgcgcccatgccggaaggcgccgacggcgtagagatgcaagagaatgtcgaggtgctcgatgacggtcgggtgcgttttggcgaactgatacggccggcgcagcacgttcgtcctcaaggcggcgaggctcgagcgggagatgaagtgctggcggccggagtgcgcttggggccgatcgaattggggcttgccgcctcattgggcgcggcgcagctgagcgtgacccggaaaatcagggttgcgctgctttccactggcgatgagctggtcgatccaggggaggcgcttcggccagggcagatctacaacagcaatcgcgtgctgttgcgtaattggctgcaccgactgggatgcgaggtcatcgatgccggagtcgtgcgcgacgatctcgtacaggtccgtcagtgtctggccggcctggctgatgtagatctgattctctccaccggaggcgtgtcggttggcgaggccgatttcctcggacaggtgctgcgcgaggaaggtgaactgacgctctggaaattggcgatcaagccaggaaaaccgctgacctgcggcagctaccgtggcgttgcggttatcggcctgccaggaaatccctcctcgacattggtgacctttggtttgttggctcggccttatctgctgcgcagaatgggcgtcaccgagatcgcgccgctgagcttccagatgcccgccggtttcagttggggcaagcccggcaagcgtcgggagtacctgcgcgcacgcctcgagtcgggcagggcggtgctttacccgaaccagagctcgtcgatcctgcgcagtgcagcctgggcggacggcctggttgaggtgcgtgagcatagccagctgaacgagggtgacctggtctctttcatctcctttgccgagttgttgggctgaaggctcggcgttatacgttgcatgggcgccggcacatccggccggctcgcccatccgttgctgcattacgtcgggtcagatggacggctcggggccggcaataaactgatctcgtttttcattgtctacctttcccatctgtgccgggtccggccgcgatgcgtctggtcataacaaggagaaacgtgatgcaggagagaaacgcctgggtcgattacgccaaagccattggaatcatcctggttgtctatggacatgtcgcgcgcggagtgttcaatgccggcttgccgatggaggaagacagctaccttctggtcgacagcatcatctatagctttcacatgccgctgtttttcttcctgtcgggcctgttcttctacgactcgctgatgaagcgcgggacgaccggactgatcgtcaataaagtggacaccgtcgtctatcccttcattctatggtcgttgttgcagggatcgatcgaggtcgtgctgtccaactacaccaacggtgacgtcacgttagggcaggtgctctcgctgctctggtcgccgcgggcgcagttctggttcctctatgcgttgttccttgtatttgtggtctgctcgttcgtttatgccaaggcggaccgccgcttctttcttcccatactgctggcgttcggcgcgctttacgtgttcaagcaggatctggcgacgaacaatatcggcagattcattttcggcaatgcggtgtttttcgcgctgggtgtgtggttcagcgagatcagggcctattttctcgcccgttacgttccgctcacctggttgttcggggtgctattcgtggtcgggcagtacctgttccatatcaccttcggtttgaactgggaggtcggtggcttgccggttcttgcgctggcgagtatctcgatctttttcgtgatatcactctccatgtggttggggcggattcgcatcgagtggttgttgttcatcggcgcctcctcgatgactatctatctcatgcacatccttgccggcagcggggttcgggtgattctcagcagcttcatgggcatcgattcgatccctgtgcatctggtgcttgggacgctgatcggcgttgcggcgccattgcttgcacaaatcatcatcaaacgttacgacctgtccttcctgctggcgccgcctaggtccgtctctgcaacgaacctgcgatctcgacgggcgctagcgcactgaaccgctaacggcggttcacgagcggacgcttctgccggcccatggagtgttcgcttggacgcccggccggcgccgggcgcgatgtgggaaattatccgcagtggacctgctggatctccagcgcgtcgtcggtcgtcaggtttagtcggccggcgttgtattccagggtcaccacgtcccccggcctgagaatgcgtgcggtggaggctccgctctcccggcgtgcctgatcgagcagtgccggggtcgccttttccccgacgagcttttctacagcagaggccgtgcatcggtcggctgccgcgtccccgggggcttgtgcttgttcgggtgccgatgattggcagccgagcagaatggaactgcaccacatcgctgcaatcagggggatggctcgcatattggtctccttgaagggaaagtcgtcgtcagctatatgcagactgttgaggttaaaaccgctcgagagcgaaaccttagcgcgtagggaactggcggaacagcggcgtcgtcttacttctgacggcccgtcgctaactgcgctggctaccgaacaaaaagataaggagttccgccatgttcaactcttccgtgatgaagcgtgtggccaccctggtggcagcgatgcatttcatgctgttcgcgcagattccaatggcccaggcggcgatgatcggtacgcccgaaatcattgccgaacatcagcagcaagtggatcgacagcagttgctgacgatgcttgaagatcaggatgtgcaaaagaagctggttgccatgggtgtcgagcgtgaccaggtcgagcagcggatcaatagcctgaccccggcggaactcgcgcagttcaaccagcagttggatcaggcgcctgcaggcgctggtgcggtggggatcatcgtgctgtttctggtgatcttcatcattaccgatctgctgtgcgcgactaacatcttcaacttcgttcactgcatcaaccgttgattcggcgactgacattactggtcgcgatagtccttctcggggcgtgcgcgcgaactccgatcgttccggtcggtaccgcgggcctccccgagcgggtggaactgagtcgtgtgccgttttacccgcaggaagactatcaatgcgggccggcggcgttggctacgatgctgagctatcgcggcatcgataccgacccggaacggctggtcaagcgggtctatatcccgcagcgcaagggcagtcttcaggtcgaaatggtcgcggcggcgcgtgcgcatgacctgttggtgtatccgttggaagggcggttggaagcaatactctccgaagtggcggcagggaacccggtcctggtgttgcaaaatctggcattcgaccgctggccccagtggcacttcgcggtggtggtggggtacgacctggctgatcagacgctggtgctgcgatccggtacgactcgtcgctggaccggaagctttcgccaattcgagcgaagctgggctaaaggaaatcgttgggctgtggtaaccgtcgcgcccgatcaactgccgcgcaccgtgaaagagacggtttggctacgagcggcgagcgatctcgagcaaaccggtcgccaggcatcggccttgcgtgcatacgaaaccgcggcgcagcactggtccagcggtttatcctggttcgcactagcgaatgcgcactatgcgcaagggaacaagcgtgcggcagagcgagccttgcgaaccagcgtgcagcgtgacggcgcgtttgcggcgagctggttcaatttgtcacaagtgctcgcggagcgcggttgccaggcccagtctttggcggcgcaatcgtgtgcgcggcaactcgccccagaggacaaacgattccaggcgcacctgccttcggcaagtgtgaaggctgacgcgtgcgaagcgcccccagcgtgtccggcgctttagagctcgaaagggcgccgaagtggcgcagctgcttgcattgaatgcagcgaatacgccgccgtctttcagatcgcagtcgatgccgtaacgcgcgacacgctagcggatgatgtgtacgccttcgaaagccattgcaccctgtactgcgctcgacggtatcgatgtcacggctgtagcagttgacggttgtccttcgtagcgcccagaggcgccgaacccggccttggccgcttcctatgcaacgatacgaaaaccgtgttcgaaaagggacagggcggtcgatagctcgacgtaacctgcgacgatcacgcagacgtccgtctcgacgcgactgcgtaggcatcgcgctccggcgcggaaattcgccgaggcagcgtaaacaaagagataagaggtgtgcgacattccggtcgcccctgttctcgatacttgacgctgatgctgtctcgactgggtttgaggcgccatagcaccgcaataacggtgctttcgctcaaaaattacgaatatcagtggcttagcgaaaaaagcgcttgactctatcaggcgaatctctagaatgcgcgtccatcggaggcacatagctcagttggttagagcaccaccttgacatggtgggggtcgttggttcgaatccaattgtgcctaccaattccgagaaaagggtcgcgctagcggcccttttttttatgcgtcgcttgtcagtgcggatgctttctgaaagcatccgcactttaattttccagagacttcggtttgcctgaatctgccttcgggctcccgccactgtgcggcggggttattcggcgggccgctttcctggctcatcccaacccacgtggcctttggtaggggtcaccactaggagaggaggcgccatgcccaccattactcttcccgacggcagtcagcgttcgttcgatcacccggttacggtcgccgaggtcgcgcaatccattggtgcggggcttgcaaaggctacgctcgcgggcaaggtcaacggccgtctggtcgacgcctgcgatctgatcgacagcgattcgaccctgcagatcattacgccgaaagacgaagaggggctggagatcattcgccactcctgtgctcacctggtagggcatgcggtcaagcaactctatccgtccgccaagatggtcatcgggccggtgattgcggaagggttctattacgacatcgccttcgagcggcctttcacgccggaagacatggcggcaatcgagcagcgcatgagggaactgatcgataccgagtacgacgtgatcaagaaggtcaccccgcgtgccgaggtcatcgatgtgttccgggcgcgtggagaggactacaagctgcgtctggtcgaggacatgcccgacgaacaggccatggggctgtactaccatgaagaatacgtcgacatgtgccgcggcccgcatgtgcccaacacccgctttctcaagtcgttcaagctgaccaagctgtccggcgcctactggcgtggcgatgcgaagaacgagcagctgcagcgcgtctacggtaccgcctgggcggacaagaagcagctggccgcctacattcagcggatcgaagaggcggaaaagcgcgaccatcgcaagatcggcaagcgcctggatctgttccatacccaggaagaggcgcctgggatggtgttctggcatcccaacggctggaccatctaccaggtcctcgagcaatacatgcgcggtgtgcagcgagccaatggctacctggaaatcaaaacgccgcaagttgtcgatcgcagcctgtgggagaagtccgggcactggggcaactacgccgaaaacatgttcacgaccgagtcggaaagtcgcgactacgcgatcaagccgatgaactgcccctgccatgtccaggttttcaaccaggggctgaaaagctatcgcgagttgccgatgcgcctggccgaatttggttcctgccatcgcaacgagccgtccggcgcgttgcacggaatcatgcgggtacgtggtttcactcaggatgacgcacatattttctgtactgaagagcaggtcagtgccgaggctgccgatttcatcaagctgacgatgcaggtctatgctgacttcggcttcagcgatatcaagctgaagctgtccactcgcccggaaaagcgtgtcggcgacgacgcgttctgggatcgtgccgaggccgcgcttgcgggtgcgctgaacgaagcgggcctgccttgggaatacctgccgggcgagggtgcgttttacggtcccaagatcgaattcacgctactcgactgcctcgggcgttcctggcaatgcggaacgctgcaatacgatccgaatatgccgcagcgcctggatgcgagctacgtggcggaagataacagccgcaagacgccggtcatgctccaccgggcaatcctggggtcgttcgaacgcttcatcggcattctgatcgagcactacgaaggtgcgttcccggcctggttggcgcccactcaagctgtggtgatgaatatcaccgacaagcaggctgatttcgcactggaagtggagaaaacgcttaaccaaagcggcttccgtgccaagtccgacttgagaaacgaaaagatcggctttaaaatccgtgagcataccttgctcaaggttccctatcttctggttatcggagacagggaagtagagacacgagccgttgctgtgcgcacccgtgaaggcgtcgatctgggctccatgcccctggatgacttcgcgcagctgctgacacaagcggtttcccggcgtggtcgccaagaattggagtaatgactattaagcgtgaaatgagacaggataaacgagctgcacccaaggccccgatcaacgagaatatctcggctcgtgaggtccgtttgattggtgctgatggcgagcaggttggcatcgtctcgattgatgaagcgcttcgtatagctgaagaagccaagttggatctggtggaaatttccgccgatgcggttcctccggtttgccggatcatggattacggcaaacacctgttcgagaagaagaagcaggtcgctgcggcgaagaagaaccagaagcagatccaggttaaagaagtaaagtttcgtccagggacggaagagggtgactaccaggtcaagctacgcaacctggtacgtttcctgagtgacggggacagggccaaggtttcgttgagattccgtggtcgtgagatggcccatcaggagctggggatggaactgttgaagcgggtcgaaggtgacctggctgaatacggttcggtcgaacagcatccaaagatggaaggacgccagctgatcatggtcatcgctcccaagaagaaaaagtaaccaccagggcactggcaggccttgcggttatttgaaatcacccacactgtggagtaccgaacatgccaaagatgaagactaaaagtggcgctgcgaagcgcttcaagaagacggcgaatggctacaagcacaagcacgctttcaagagccacatcctgaccaaaatgtctaccaagcgtaagcgtcagctgcgtggtacatctctgatgcacccgtctgacaacgcaaaagtagagcgcatgctgcgcgttcgttaattcggtcaagactcagaggaataactcatggctcgtgttaagcgtggcgtcgtcgctcgtcgccgtcacaagaaaatcctgaaactcgccaaaggctactacggcgctcgttcgcgtgtgttccgtgttgccaagcaggcggtaatcaaggctggccaatatgcctaccgtgaccgccgtcagcgcaagcgtcagttccgcgctctttggatcgctcgtatcaacgctggtgctcgtgtaaacggtctgtcctacagccgtttcatcgctggcctgaaaaaagcagccatcgaaatcgatcgcaaggttctggccgaattggcagtgaacgaaaaagcagcattcgctgcgattgtcgaaaaagccaaagcttctctggcctaagcccatcgacaatcgaatcttcggattcgtagcgtcaccgataggggaagagcctgcgctcttcccctatttcgtatctgaaggggcatttgcaaaagtgcacctcgcgcaaagcctgaatgctgatcgcctggtgcggttctgcaagaacctctggaggttgtacatggaaaacctggatgcactggtctcgcaagcgctcgaggcggtgcaacatagccaagacatcaacgccctggaacagatccgggtccagtatctcggcaagaaaggcgagctgacccaggtcatgcagactctgggcaaactgtcggcagaggagcgccccaaagctggcgcgctcatcaacgcggccaagagccgtgttcaggatgaactgaacgccagaaaggcagacctcgaacaagctgcgctgagcgccaagctcgcggccgagcggatcgacgtgacattgcctgggcggggtgaagtctctggtgggctgcatccggtaacacgtacgctagagcggatcgagcagttcttcagccatatcggttacagcgttgccgaggggcctgaagtcgaagacgactaccacaacttcgaagcgctcaatattcccggccatcacccagcccgggcgatgcatgacaccttctatttcaacgccaacatgctgttgcgtactcatacctcgccagtgcaggtgcgaaccatggagtcgcagcagccaccgatccgtatcgtctgtcctgggcgtgtctaccggtgtgactcggatatcacccattcgccgatgttccatcaggtcgagggtttgctggtcgacgagggcatcagctttgcggatctgaagggcacgatcgagcagttcttgcgggtgttcttcgaaaagccactgggtgtccgtttccggccctcgttcttcccgttcaccgagccgtctgctgaagtggatatgcagtgtgtcatgtgcagcggaaagggttgccgcgtctgcaagcagaccggctggctcgaggtgatgggctgcggcatggtgcatccgaatgtgctgcgcatgtccggtatcgatccggaaaaatatcagggctttgctttcggtatgggagccgagcggcttgccatgttgcgttatggcgtcaacgacttacgcctgttcttcgataacgacctgaggttcctggcgcaatttcgctagttccagagtccagtcaaagaatatttaggagagcaggatgaaattcagcgagcagtggttgcgtacgtgggtcaatccgcaggtttcccgcgaagatctggtggcgcggctatcgatggtgggcctcgaagtcgacgcggtggtcccggttgccggcgcgttcagcggcgtggtcgtcggtgaggtggtgagcaccgaacagcatcccgatgctgacaagttgcgggtgtgccaggtcagcaatggcggcgaaaccttccaggtggtctgtggcgcgcccaatgtgcggcccggtctgaaaattccgttcgcgatgatcggcgcccaactgccaggcgacttcaaaatcaagaaagcaaagcttcgcggtgtcgagtccaacggcatgctctgctcggaaaccgagttgcagatcggcaccgacgatagcgggctgatggaactggccggtgacgccccggttggtagcgatctgcggacctacctcggtctggacgatgcgagcattgagataggactgacgccgaaccgtggcgactgcctgtccatcgccggtcttgctcgcgaagtcggtgcgatgtatgacgcagcggtaactgccgtcgatatcgctgccgtggtcccgagccatgatgaggtgcgccccgtagaggtgctcgcgccgaaagcctgcccgcgttacctcgggcgcgtgattcgaaatgtcgatctgtcgcgatccactccgctgtggatggtcgagcggttgcgtcgttccgatattcgcagcatcgatgcggtggtggacgtcacgaactatgtgatgctcgaactcggccagccgctgcatgcattcgatcttgccgaaatcaatggcggaatccgggtccggatggccgaggagcaggaaaagctcgtcttgctcgacggccaggaagtgaccctgcgtggcgatacgctggtcatcgccgaccatcagcgcgccctcgcgattgcgggcgtgatgggcggtgagcacagtggcgtcagcgcctcgacacaagatctgttcctggaaagcgctttcttcgacaccatcgcgctcgccggcaaggcacgttcttatggtttgcacaccgatgcgtcgcatcgctacgagcgcggagtggattctcagttggcccgtcgagccatggagcgggcgactgcgttgctgttggagattgtcggaggcagcgccggtccggtaatcgaagctgtcagcgaagccgatcttcccagcgttgcgccgattctgctgcgcaaggatcgcatcgagcagatgctggggttggacatggcgcgcgatcaggtcgtcgcgctgttgtccgccttgggtttgggtgtggttgagctgaaccaggaatcgtgggaagtcagcgtacctagccatcgattcgacatcgcgctcgagatagatctgatcgaagagctgggtcgcctgtacggctatgaccgccttccggtgcgttatccgcaggcgcggctggcacccgaagccaatcctgaggcccgtgcagagttaccggcactgcgtcggttgctggtcgctcgtggttatcaggaagcgatcacgtacagcttcatcgatcccaagttgttcgagctgttcagtccgggcgtcgagccgctacagctggccaatccgatttcctcggacatggcggcaatgcgcgcaacgctctggcctgggctgatcaaggcgctgcagtacaacctgaatcgtcaacaaacgcgggtgcgcctgttcgaaagcggcctgcgtttcgtcggtcagcttggcgacctgaagcaggagccgatgctggcaggcgttatcactggcagccgtctgccagaaggctggggcaacgatagagccgcagcggacttttatgacgtgaaagccgacgtcgaagccttgctgggatatgccggcaatgccgctgcctatggcttcgctgccgccgaacatccggcactacatcccgggcagaccgctcgaatcgagcgggaagggcggttagttggctacatcggaagtcttcacccggagcttgcggcaacgctgggtatcgatcagccggtctatctattcgagttgctggtctccgaaatcagcgagggtcggctgccgcgtttcagtgagctgtctcgtttccctgaagtgcgccgcgacctggctattctggtggcgcgtgaggttccggcagacgatgtgttgctatgcattcgtgaggctgctggcgacaacctgacggacctcaagctatttgatgtttatcagggtaaaggtattgatccgcttagcaaaagtgtggcagtcggcttgacctggcaacacccttcgcgcactctaaacgacgacgaggtgagtggtgcgatgcagcaaatcctctcctcactggaagaaaggtttaatgccacgttaaggaaatagcgtatgggggctctgacgaaagctgaaatggcggaacgtctatatgaagagctaggcttgaataagcgcgaggccaaggagctggtcgagctgtttttcgaggaaattcgtcaggcgctggagcataacgaacaggtgaaattatccggtttcggtaatttcgacctgcgagacaagcgccagcgccccggacggaatccgaaaaccggtgaggaaattccgatcacggcacgccgtgtggtgacgttccggccagggcaaaaacttaaagccagagtcgaagcctatgctggaaccaagtcataacgacgaactgccgacgataccgggtaagcgctatttcaccatcggtgaggtgagtgagctatgtgcggtcaaaccgcacgtactgcgctactgggagcaggaatttccgcaactgaaccccgtaaagcgccgtggtaaccgtcgctattatcagcggcaggatgtgctgatgatcaggcagatccggtctctgctatacgaacaaggcttcaccattggcggtgctcgacagcgcatgtcaggtgatgaggcccgtgacgacaccacccagtacaagcagttgatcaggcagatgattaccgagctcgaagatgtgcttcaggtactcaagaactaagcggccgcaaataaaaaactttcacctattcagatgcttagtgtatagttcgatccgctttcagcagagctgaaagcaccgtcggggcgtagcgcagcctggtagcgcacttgcatggggtgcaaggggtcgagtgttcgaatcactccgtcccgaccaaaaaacctcaagaaatccagtcacttagcggtgactggatttttttatgcctgatgttttttgagggcttccgatttttgccccactttttgccccaccggggatttttgcgctggtcactacccgtgaggagggacgggtggagggttttgtgtgggctgagccggcaggggtgttcctgcctggctagtaattaaaaggattgcagtggcaggaataagcgacggctatccgagattgcgatctgattgctgacggccagcgtacgcttgatggcatcggctagcagcaatccgcctatgccacgaccctgagcatcctggctgatggcgaggcggccgagcaaggcggcggggagtgggtggcgggcagtctgcgagcaagcgtttcgggaagctggtcgaactcgatcgacaggctggaaagggtgtagtaacccgtgatgacgtctggctgctccaacgtggtggcgacgaatacccggctaacgcggcgctttacgtcttggccggcttgcttgtgtaggtagtcgtccagtgcgtttacgccgcattggaaaccggctcagtgatggttggtggctaaggcgtgatgagcagatcgactcgctcgctcattgatcggtgacacgctactcgtgactctcaaggacggcggccaacttcttgttgaacatgaccggcttgctcagcgcatcgaggaacgcttctgcatcgctcgccttcaggctcatgacctcatgctcgcgaatggtcttctcggcatgtgccagtgcgctgttcaggatgaactggctgacggtcttgccctcgaagctcgcggcgcgttccagggttttcttggcgctctcctgcaggcggaggttgatccgtttctgcttggtgtctgaggctgtgttcatgtcgaaagtggccactccaaggttgatgtgaagtatcgtacgtcaaagtggtgccttatcaatgtcattcccgtactgagccaacttccgcaaggataacggtaaggccatccgcggcgtttgtcggcagtttgtcgtgctgtgccagcagctcggtctgttcgccgaagcgctggtggctatcgacggcagcaagttcaaggcggtcaacaatcgtgatcgcaacttcaccagtaccaagtttgcaacggcggatagaggaaatcgaatccagcatcagccgctacctcaccgtcctggacactgccgatcggcaggaacctgtcgtggcacaagccaaggccgagcgactgcacagcaagatcgcggcgttaaaagtgaagatgcaggaactccaggccatcgagatccagcttcagaccgccccagacaagcagatttcactgaccgatc

SEQ ID NO: 24 - DNA, 94613 bp, Pseudomonas sp.
atcaacagatggtcgggggtttgtctttgggcgaggaaaaaactggcaggcaccgagcggtagttgtgcgctcatgactgcggctcggtggaacggctctagcagcccccgctatcaagctgctggctcgccatcgagttgcgcctcgaaggcggcctcgccagggctactcgataacctgaggcccctgtccagtgcgcttgagccaaggcaacgatagattccgaccggaccgaacaacccaatattcgcgaatcaagccagctactactggcaaactgtggcggccatagctgagagtgtgatcggccggtttgaccctttaccgtagcgccctggatatctccatgaacgtgtcccaaggcttgctagcagttgcctcgcttcgagactctcactacatactgcaaggactgttgggcttttggtgatggccggctacggcctctgctaatccaacaagaaccatgctgggtatgttgctagcgagccaatgcttggccggggcctggctagagtgatgagcttgtcttgaaggcaagcttgaccactgagcgaaacacattatgcaggcagaacaataatgacgtaggcacttcgatgcctgtttagtcaccccggtatacgcagccgcttgtgcaggtttcgtggagacggattctcgatagctccggtaatagcggcttcagctcatgccagatccatttggccaagttctcactggtggggttctcgagtccgggtagatcatttaggtaattatgatcgagcctttcatagatcggcttgaaggcctgttttatttctccgaagtcccgaatccagcctgtgtgcggatccgcttctcctttcagataaatcgctattcgaaacgagtgaccgtgcaggcgtccgcatttatgaccttctgggacgtgcggcaggcggtgcgcggactcgaacgtaaattccttgaatatttccatgtgatttactccgatggttttaatcagccgagtttactggctttgcaagtgagctgtcgcaactgagcgactgtcgcgatgcgtaatgaccggaccgctttgatagcgcgtcgtcttttgacagtccttcgggcatggggcaaagtacccggcttttaattggcacttgccactttgggggttgtaatgaatgcagtagtggcggctgtcagcatcatgctgattctaagtctgtgccgagttcacgttgtcgtcgcgttgattgccggggccattgccggcggagtcttgggtgggttagggctcgagggcagcttggctgcgttcaacaagggactgggaggaggcgcgacggtagcgctttcgtacgcgttgcttggcgcgttcgccgttgcgatcggaaagagtggcctggcccatgccttggccgaccgggcgttggccatggtgggcaaacaggagtcgcaaaaggcgggagcggttaagtggttgatgatcggactgcttctggcggtcgctgtgtcgtcacagaatatcctgccgattcacattgcctttataccgttgctggttccgccgttgctctatgtactgagcaagctgcagatagacagacgcctgattgcctgtgtattggcatttggattggttacgccctacatgttcctgcctgtaggtttcggcgggatctttctgaaagaaattctgctcgcgaacgttgccaaaagcggcgtcgatgtctcggggatcaacgtaagccaagccatgttgattccggcgctcggtatggcggttggtctcctgatcgccatgttcagttaccgcaagccgcgcgtgtacgacctggccaaggtcgaccaatcgcaagcggttagcgttagctacagtccccttactctgctggttgccgctttggccgttgccgccgcgtttgtcgtacagctctggctggattcgatgatcatcggtgcgctggtaggtttcgtcatcttttccgtctcgggtgtcgtgcgttggaaggaggccgatgatctatttaccgaaggcatgaagatgatggcgatgatcggttttatcatgatcgccgccgctgggtttgcagaagtcatgcgtgaaaccggcgatgtgaaaactctcgtcgatgcgtctgcagagtggatcggtaacagcaaggccatcggcgccttgatgatgttgctggtggggctgctggtcaccattggcatcggttcgtccttctctacggtaccgatcatcgccgcgatcttcgtgccgctaggactgcaattaggcttcagcccgttggccatcgtcagcctggtaggcacggcgggagccttaggagacgccggctcaccggcttcggactccacgctgggtccaactgccggattgaatgcggacggccagcataatcacatctgggatacggtggtaccgacattcgtgcactacaacttgccgctgctggcgttcggttggattgccgcgatgacgctatgaccggctaggatctgccctgccgtggcttgatggcgtcgtcgcaatggcgacaccatcatcacctctcaatatcaatcaattagcactcctcgccgcgatcgctgactaatagatacaaccgcagcgataggatgatgattgtgaattcgactctagagcagaaagtatttctcgctctgctacttgtcgtgacgattgccttcggctggatactgcttcctttctatggggcagtgttctgggccgttattcttgcgatcattttcgcgccgctgcagcggcgtctttaccagtcgctcggcaacaggcgaaacctcaccgcactgctcaccctgttggtttgtttgatcgtcgcggtgctgccggtcattctgataaccggcctgctggttcaggagggaacggagctttataaacagattgaaagcggtgagctcgacgtaggcagccttgtcggcagcgcaaaacagttattgcccgcgtcgctggagtcacaactgcatcggtttgggcttggtgatgtcgagcaaatgcgtgagcgcttggccagtggcgccttggaaggaagtcagttccttgccaccaaggccttcagtttcgggcagggaaccttccagttcctggtcagctttttcgtgatgctctatctgttgttctttctgattcgggatggacgcgagcttgtcacgcaagtccgacgagcgctgcccttgaacgacaaccagaaacgcaggcttttcagtaaattcacccgggtggtcagggcgaccgtcaagggcaacatcgtcgtagccgccactcaaggtttcctcggtggcgtcatcttcgccatcctgtcaattccgggcgcattgctatggggtgtgctcatggcctttctgtccttgcttcccgccgtgggtgcgggattgatatggacgccggtggccatctatttccttatgaaggggatgattgttcagggcgtggttctcacgctttacggggtgttggtaatcggccttgtcgataacattctgcgtccgattcttgttggaaaggacaccaagatgccggactacctggtgctcatatcgaccctgggagggcttgcactgttcggcctgaatggtttcgtgatcgggccgctgattgccgcattgttcatgtccgcatggggcctgttcacgtccgccgatggtcgagcccctcgctaggtgcgtccggtatggacgcacctgttcttcggctagagcacgcgtccgccgtcatcgcggctgatgactaccgtggccgagcgcggtctgcggttacctccgtccggccatgtgctggtgtattcggtcgagctggagccttctccgggatgctgtatgttgacgaacagcgtccgaaaatccggtgttgccgtaatacctgtcacctcagcgcctatcgggcctaccaggaatcgtttggtttcgccggtctgtggatccgagaccaacatctggttgttgccgaagggacctttctccagttgggtgccactcatgtcggtctgtatccacaggcgaccctcgtcgtcgaaccagagcccatcggggctggccaggatattcccgtcactcaacggcctgcccaacggatcgcggctatcgttctgcgggccggcgagtaggtacagatcccattgaaattgcgtgccggtatggttcgatgacagctcgcgccaccggatgatgtggccgtaggggttaggggcacgaggattggcggcgtcggcttcctgccgggcactgttgttcgtcagggtgaaatacacatcaccggtgttgggatgcaccgcgccccattcaggccggtccatgcgggtcgcgccgacggtatccgcagcgaggcgagtgttgataaggacctcgccctgatcggcgaaattgacacctgcggcgatgcaggcctgctggaatccagcatcctcgatgtccagcggtaaccagtcgccgctgccgtccgggttgaagcgcgcgacgtacagggtgccttcatcgagcaggcggctgtcgctgtgctgggggcggtacttgtcacggctgacgtatttgtagatgtactcgttctgcgaatcatcaccggaatagcagacgacaggcgcacctggacgagtcggggcaaacaccagtccttcgtgggcgaagcgcccgagggcggtgtgtttgatcggggtggagtcggggtcgaacggatcgatctcgacgatccagccgaatgtattgggttcgttgcgataatcggcgcgtggatcctcggacgataccgtcgcatcgaaacgctgaaattcgtcgcctggaatggtttcccagccgtagcggctggcggagcgaatgccataacgctgtaagtgtcgtggaagctccgcatcgcggctcgcgaaatagcctgcccagttttcctcgcacgtcagataggtgccccagggcgtatagccgttggagcagttattcagcgtcccgcgggtcgatgtaccgctcgggctatagcgcgttttcatcaggtcgtggccgcgagctggcccctcgattcgcatcggcgtggcgccggtgatgcgtcgattccgggccgaaggcaacatggtccattcgccgcgaacactgcgacgaacttctacgatcgatacgccgtgagcgttgatctcttttcgcacttcatcagcgttgacccgcttgccgttgacgaccgtagggccgtttcgatggagtagcggggcatcgatatattcgtggtttacagcgaggaggccgtggtcgctcttgcgagctctgaacttcgcatccatcgggaagaagtgcatgccgtcatgatgcatgccggtctgctgcgcctggtcttgcgcgctgttgctggcatcttccagatagcctgggtagctgccgcaaataggcgtgccccagggaataaaggccgtcgcggcatagcctgccgggaccgtaaccgtgtcggctctgtttatgctcacagcatcgaacggcaggcgattgcggcgcttgaacgccggcttggcttggtcagccagggcaggtacgccgccaaggaaggcgagcgcacccagcgcagcgccgccggccagaatcttgcgtcgccccagattgatgacgtcttgaatgtgaggattggctgaacggttgctcggcaattcatcgccattgccaaacagtatgttgttatcgtcagtcacgacgcagctccataggataatcgacggaactgtgacgctaggccgggcttgcgacagcttagtgacaggaaagtggcggccgacaggcggtcggcgagggcgccaaacgaactttacagacggcccgtttggcgccgcagaccgataggcgaagccgcggccgtcctgcttacattcccatcaggcgatcccgactgggtggcgcgtttcgctcaaagccaccctttctccttatagaagcgctcggccccttcatgcagcggcgcggtcaggccgacccgaatcatgtctttggcttccaggtcggcaaaggctgggtgcagtcgcttgaaacgctcgaggttgtcaaagacagccttgaccagctgatagacgatttcggggtcggttttcgaggtcgtggccagcacggccttgccgccaatcgaaggcaccgcggtatcgacgcccgggtacagccccgccggtatctgcgctgcggtgtagtagtcggcgtgctgcaggaacgcgtcgatttccggcccggagacgggtatgagcttcgcatcgacattggtgagcgcctcctggatcgccccactggggtggccaaccacgtaggtgatggcgtcgaggttgttatcgcccagcgccgaggccatctctgcgggcttaagttcgccggccagggcgaagtcggcgttgctccagcctttggctttcatcacttcgtcgagggtgtcgcggctacccgaacccggcacgccaatgtttacccgtttgcccttgagatcatcgaacgactcgatgccgctgtcgcttcgcgcgaccaccgtgagaatttcggtctgcaatgaaaatactgcacgaaggtccttaagcggacccttcttgtcgaacggagcgaggccattgagggctttgtgctggtgatcggactgaatgaagccgaactcgtattcaccgctctccagcgccacgatattggtcacgctaccggccgtggacggcgcattgcatttgatggccggctgcacctcagcgcgattgagaaaacggcagaccgactgaccggccgtgtagtagacgccagtctggccaccggtgccgatagtgacgaaacgctcttgggcgacgccagtggcagcgttcagcgagcctgccagggcacagctcagcaagccgatacggattttctgcttcatcatgagtccctcttttgttgttgttcgaatgggttgtctattcgcctgcgcgggcggctgcccgtgtcgatacgctcgatcaggatgggttcggcatgccgctggcggcgatcaccatgatctccacgagtacgtttggcgaggcgagtcgcgcttcgacggtcgctcgagccggtgcgcaaccggctggcaaccattcgcaccagacggcgttcatcgcggcgaagtcggcgtctatgtctttcagccagatctgtgcgctgagtattcgtgagcgatcggatccggccgaggccagcaaacggtcgatcttggacaatacctggcgagtctggccggcagcatcttcggcacgatcgtcaggtacctgcccggcgaggaagatcagattgccgaaactaacggcggcggacatgcgttccgtggtttcgaggcgttgaatcgtcatgttaaagctcctcttggtttgactcgatcaggcagcgagggtgaggccgtccagcgtaacggcagggcgctgatcgtcgatcagatcgcagagcacgtcggcgctcccgcaggccagggtgaagccgagactgccatgacccacattgagccagaggttggcaaacggagaggcgccgagcagcggcgtgccctctggagtcgcaggccgcaggcccgcccattgcgtggcgctgcgatagtcgccggcgtcggggaaggtttcactggcaaggcgttgcagcatggcgatcctgcctcgatcgacggtggcgtcccagccgccgatgtccaccattgccgcgacgcgtaattgctcgccgagccgcgcatagacgaccttattgtcgtagtcggtcacgttggtttcaggcacgccggtctggcggcgcagcggcagcgtcaagctatagcccttgagtggatagatcggcagctcgatacccaacggcttcagcaatgcgacactggcggcgccggccgccaccaccacgtgatccacttcgagcgcctcgttctcgaggcctagcgagcggatacgcccatcccgggtgtgcaatgcgctgaccgcctggccacaatgcagccggaaccccgacgatgcttccagccgctccagcagccgccgacaaaacagttggcaatcggcgacctcgtcgcctggcgaatagatgccgccctgcagttcagccaccagcggccgcagggcgggttcgatttcgccgcattgctgagcgtcgagcaggagctgccctgcattagcgtcgaggccgccagccgccttttcgaaggtggttcggtcgcgatagatcaccagcttgccattggcgcgccagtcgaagttaccgagaccgtcttcttctctccagctgcgcaatacctgctggctgtgcagggcgaggcgcagcagatgggcggcgttgcgtcggttgacggagcgtcggcaggcgagcagaaagcgcaggcaccagcgccattgctgcctgctcattcttgggcgaaaacgcaaaggggcattgtctccacgcagtagccagccaagcgcctgcaggggaacgcccgcatcggcaagcggtgacacgtagcggtagctgagttgaccgccgttggcgaagctggtctccagggcgacctggtcgcgcttttcgatcaggtccacccgatggcctcgccgcaccagggcataggctgtgctcaagccgatgacgccgccgccgattaccgctattcgcatcgtgccactccaacaaatcgatgaccgaagcctaagcgcggccggcgcgcccagccaatgaaaggatggaggcgacctataacccgaggttatgctccggacacgtcagctccggagcatgctcatgcgtcttcgccacatcgaactgtttcaggccatcttgcagaccggcagcctgacggccgcggcgcagctgctgcatatctcgcagccggcggcgagcaagatcctcaagcatgcggaacagcaactcggattcgcgctgttcagccgcgtgcgaggcaagctgcagccgaccgccgaagcgcggatcctgcagcaagaaaccgaacggatcgccgcggatctgcagagccttcggcgcttggcggacaacctggggcgtggcgaagagcgtgcgctacggttgatctgtacgccggcactggcgcaggcgctggtgcccgaggcgctgcgatgctggcgaaagcgttttgccgggacgcgatgccatctggcgactcagcacacgacggagatcgtcgaggcgctgctgctgcgcgaggcggatctcggcctgacgctgcaggcggtggaacatcccggcctcagtagccagaccctcgcacaggggcggatgatggtgatcgcgccgtcgggctggtggccggaggaagcgctagcgcaaccatttcgactggagcaactggcctatgcgccgttgatcggcctggatacccgcgatgcgctcggcggcttgttgcgggggcatctcgaagcactcgcttcacctccccgtatcgatacctgggtgcagacctaccagctggcgcgcagcctggtcgaggccgggcagggattggccttggtcgatccgctgacggcactgcacggtagcgggcagtcgattcaggcgcgccctttggaacctcaggttccagtaccgctgtatgcgctggtacgggcccaggaggcggcacctgcggcgcaactggaactgctcgagcaagtgcgccaacaggcggaaagattgatgcgtgcgccaccccgcatgtgaacgaatcgtccggtaccgttctcgcggtccggctgcgttaccatcgtcggatatcaaccgggttcgggcttcatggaacacatcacaccgcttgccctgtatcagcaggccgtcgaacttcgtggcttcgtcagtgacgcagcccaacaacgggcggtcgagcggttgcaggcttgttaccaggcgctgcacgacgacgcggccatcgccccgcgtggcatctatctgtggggcccggttggccgcggtaagacctggttgatggatatctttcaccgcagcctgcggatcccttcacgccgacagcattttcatcacttcatgcgttgggtgcacgttcgcttgttccagctcaacggcacggccgacccgctgcaagcgctggcccgggagctcagcgaacaggtccgggtgctctgcttcgatgagctattcgtgggcgatatcggtgacgcgatcatcctggggcgcctgttccgggtaatgttcgagcatggggtgattatcgtcgccacgtccaatcagccgcccgatcagctctacgctgacggcttcaaccgtgagcgtttcctgcccgccatcgccgccatcgagcagaacatggaagtgctcgatgtggacggcggagcggatcatcggttgcgcccgggggctgcgctgcagcgttactgggtagctgagccaggccgcggtggtgcactgcatgccgtgttccaggcattgaccgacggccagcatgccggtgccgctccggtgagtgtcggtcggcgcgtgctgcaggcggtgggttgcagcgactcggttctgtggtgtcgcttcgccgatctgtgcgagcaaccgttttcggcgctggacttcatcgcgctgtgcgatcgcttctcggcgattctgctcagtgaggtaccgaagctgggtggggagccgcgcgaaggacgcatcgcgcgcggtacggaagatgctgccacgagggtggaggcgggggaccgggagctgccacagctagcgcggcgcgacgatgcggtcaggcgcttcatcgcgctcgtggacgagtgctacgaccgtggcgtccctctgtacctcgaggcccaggtggcgctggaagggctttatacgcaagggtacctggcgttcccgtttcgccggacgttgagccggctgcgcgagatgcagctgcaacgattcggcgcgccgatctgacgacgatcagtcgcggtagaagacctgcaccaggtggtagccgaactggctcttgattggcccatgaacgtcgcgcaacgacttcttgaaaatcacctgatcgatgctgcgaaccatctgtccggggcgcacctcgccgaggtcgccacctttcttgccggacgggcaggtcgaatatttgcgagcgagcacatcgaaggcctcgccgttggcgatgcgttttttcaactggaccgcttcggcttcggtcttcaccaggatgtggcgggccatggcctttgccatcgtgatactcctcgtctggggcggcgattgtagtcagcgcagtgggcaaatcgaagccgcttctcggaaatattgaccgctcgtctgtgattcgacccgacgaacggtcgttatggcgggtttatgtgttggcatgttagcgctaccatttggcccaacaatcataacgcagcacctcgatgctgctggagagccaatagtggatcgccactccaatagtgattttcccgctgcccaccgagcattggtggtcatgggcgtcagcggttcgggtaagaccgacaccagtcacgccgttgccgatgccttgggtttccggcatatcgaagccgatcatttccatcctgaagaaaacgttgcgcgcatgcgtgccggcacgccgctgtctgatgccgatcgcgtcgagtggttgcagaggctgatcgccgagatgcagcgcgccatcgatgacggcgttggcttcgtgctcgcctgttcggccctcaagtgccgctatcgcgacctgctgcgtcatgccgttcccggtctgcgttttgcccatctggccattgactacgacaccgcagtccagcgtgtcggcggccgagccgggcatttcatgcctatttcgctagtggacagccagttcgccacgctcgaatcccccgaaggcgagccgggcgtgttggtcgtcgatgccagccagccgcgtgagcgggtgctcgaggaaatcgtcgactggatgcaacgcgacccggggctggagatcggcgagcaagaaggtttttccgccgctccgcctgatagcgctaacacgtcgagcacacgcggtgccgagctgaccggttcgccgatctacaacggacgagtcgcgcagggcttcgatcgcattaccgattggctgatggcggcattgctggcgttcatggtcgtcgtggtgttcagcagcgtggtactgcgctacgccttcggtaccggctggaccggcgccgaagaactgtcgcggttggccttcgtctggctggtgttcgtcggggtcgcctcgagcatgcgccgcggcgagctgatggctttcagcatgatccgggaccgtttcccccggttgttccgtcgcgtggtggattcgctcagttggatcatggtcgccgtcgccagcggcttggcagcgctgggcggctggcatcagatgcagttcggctggagcatcaccagcccggtggtgggttatccgctggcggtggccatgcttccggttgccgccagcatggtggcgctgacggtgctggccttgatccagctcgttaacgtctggcgtcgacagccgcctgaacatatcgccgaagccaacgtaacggccgattgatcttccgataacaacaagggcagacgcccacccgaggtccgtacatgactgtcgtcgtctttctctcgtcattgtttggcttcatggccttcggcatgccgatcgctttcgcgctgatcctcactggcgcggtgctgatgtggtatctggatttctgggacgtgcagctgctcgcacagaacctccaggccggcgccgacagcttcccgctgctggcggtaccgttcttcattctggctggcgaactgatgaatgccggcggtatctcgcgccggatcatcaacatggcgcaggcctacttcggccataagcgcggaggcctcggctacgtcgcgattgccgcctcggtgctgctggcgagcatgtccggctcggcgctggccgacaccgcggcattggcgaccctgttgttgccgatgatgcgcgagcgcggctatccgctgagcccgtcctcggggctggtggcggccggtggcatcatcgcgccgatcattccgccatcgatgccgttcgtgatctacggcgtagtcaccaatacttcgatcagccagctgttcctcgccggcatggtgccgggcctgatcatgggcgccgggctggtgatcgcctggaccctcatcgcgcggaagatcgaagaaccgccacaggcgaaggctaccggcgccgagcggcgcaaggcgctggtcgatggcgccgcggcgctgatgctgccggtaatcattgtcggaggtttgcgcttcggcctgttcacgccaaccgaggccgctgtggtcgcggcggtctacgcgctggcggtctcgaccctgctgtatcgcgagctcgcctggagcggcgtgctcgaagtgctgacccgcgccagccgcaccactgcctcggtgatgtttctttgcgccgccgccatcgtgtccgcctacatgatcaccctggcccagctgccggacgaaatcgccgccatgcttgggccgcaggccgaagacccgaaattgctgatgttcgccatcatggtcctgatgattgcaatcggcatggtgctcgacctgactccgaccatcctgattctcgggccggtgctggcgccgatcgcggtcaaggccggcatcaacccggtgtacttcggcgtgatgttcgtgctgatcggctcgatcggcctgatcaccccgccagtcggcacggtgcttaacgtcgtcggcgggatagggcggttgcgcatggaaacactggtgcgcggagtcgtcccgttcttcgtcatctacatggccatcgtcgtgctgctgatcgcagtgccgtcgatcatcaccgtgccgctgcagtggctgcggtgatcggccacaacaatcgcttcacccaaccctccacaacaacaaaaggtacgagagcatgaaacgattcctcatcgcggccctggccgccactaccctgggcagcgctatcaccgccgtcaccgcgcaggccgcggatgacattcgtcctcgcatgattcgctttggctacggcctcaatgaagacagcaaccagggccgcgcggccaaggtgctggccgaggaaatcaagaaagcctccgacggcaagctcaaggtccgcaccttcggctccgccagcctcggttcggacgatcagatgcagaacgcgctgatgggcggtgcgcaggaaatgatggtcggctcgaccgccaccctggtcggcgtcgccaaggagatggccgtctgggacacgccgttcctgttcgaaagcgagaagcaggccgactacgtgctcgatggcccggtggggcagaaggtcatggatgcgctggagcagaaagggctggtcggcctggtttactgggaaaacggcttccgcaacctgaccaacaacgtgcgtccggtcgagaagatggaagacttcaacggcatcaagctgcgcgtcatgcccaacccggttttcatcgacaccttcaagcagatgggcgccaatgccgtgccgctaccattctccgagctgttcaccgcgctcgagaccaaggccgtcgatggtcaggaaaacccctacaacaccattctgtcgtccaagttctacgaggtgcagaagtacctgagcgttaccaatcacgtctacagcccatggatagtcaccgcctccaagcgctggtgggacgggctgtccaagaccgagcaggacatcatcatggacgcggcgaagaaggctcgcgattccgagcgtgaggacacccgtgccgaagcccgcgaagcgctggcgaaaatcaaggagcacggcatgcaggtcaacaaggtcagcccggaagaaatccagcgcatgcgtgagcaggccaagccggcgatccagaccgtcgtcgacacggtgggtgagccgctgttcaacgaagtacaggccgagatcgagaaggctccgaagtaatccggcgcgccccttcgggggcgccgtcccgttgtagaatccccgcccctcaccgctggaacctgctatgagttctcgtcgtcgccgttcactggagcgggccacgttgtccgacgtcgctcgcagtgccggttgttcgttgatgtctgcctcgcgtgccttgtcgcaacccgaacgggtctccgatgcgctgcgtgagcgtgtaatggcagcggtcaaagcgttgggctacgtgccacacaccgccgcacgcaacctggcgagtgcgcgatcgaatctggtcgcggtcattatcccgtcgctgtcgaacgcggtctttgtcgacacggtcgaggcgatccagcgagtgctgatgccagccggttacgaactgatgataggcgtcagtcactaccatcctgacgaggacgaacggctgttgcgcgcctatctggcacatcagccggcgggcctgctggtgaccggtttcgagcgcagcgatgccgcgcgcgaattgctgggcagctattccagccccatcgtgaccttgatggagttgagcgatgccgacgaggagtattgcgtcggtttctcccaatacgatgccggcgcggcgatgacccgcaagctgctcgagcggggctatcgcaacatagcttttgctgccgctcagctcgacccgcgcaccttgcagcgcgctgagggctaccgaagcgtcatgcgcgaggcgtcgcgttacgacgcggcgcaggagcttctgaccccgcaggtttcgtccattggccttggggctgaactgctcgatcgattgctggcgcagcagccacaaatcgacgccgtgttcttcaataacgacgacctggcgttgggtgcgctgtttcgcgcgcggcagttgcaactcgccgtgccgcagcgcctggccatcgctggcttcaacgatctgccggcggcggcctggatgaatccggcgctgaccacggtacgcacgatccgcggcgagatcggcatgctggccggaaagatgctgctcggcttgatgcgcggagaaacaccgccacaaaggcgcatcgacgtgggtttcgaagtggtgatgcgcgacagcgcctgacccggcaaggcacgcattgcacgtgccgccatccacatccggtttacgcgcggtagtcagtctgcctgttgcgccgtcacctgctgggcgatttcgatcatctgctcgcgcatccagcggttggctggatcctgatcggtgctttcgtgccagtagatgtgcgtttccagcggtgggatgtccaccggcaggggaatctggtgcaggtcgtggcgccgggcgaaacgctccggcacggtgaccgccatgtcggtctgctgaatcacctgagtggccatcatgtagtgctgcgagcgcagggcgatcttgcgctgctggcccatcttgcccagcgccagatcgaccatgcccaggccgctgcgccggctggaaatatggatatgcgacagcgacaagtactcctcgacgctgagcttgtccttcgccagcggatggccacggcgcatggcgcagacgtagcggtcttccaatagcttgacgtggcgcacctgcgggtcggtattgagcggcgcgtccatggcgaaatccaggcggccggcagccagctccttggtggtttcgcgacgcttggccagcatgctttcgatcttcacattcggtgccagccggcgcagccgctggaacagcggtggcaacaccacggcctcggtgaggtcggtcatgctgatgcggaaggtcttgttcgcttgcagcgggttgaaggtgcggctttcctgcaccgaaacccgcagtagctgcagcgcattgcgcaccggcccgatgatgttctgcgccatcggcgtcggcaccatgccttgcgcggtgcgtacgaacagcgggtcgttgaacgtctcgcgcagccgcgccaatgcattggaaacggccggctgggtgatgccgacgatctgtccggcacgggtcaggttggcttcggtgtagatggcatcgaagacgatgaaaagattcagatcgaccttgttcaggttcattgttgtgctctccggcgtgtatcggaattcgccgatcatatatcggtgatgaatgtttatacacgaggaaaatagcttagataaatcgttgggcctcctctagcatctaaaactacaaaacgttacctgcagaaggtctgtcgccatggatttcgcctattcccccaaggttcaagagttgcgtgagcgcgttcaggcgttcatggatgcacatgtctatcccgccgagaaagtgttctaccaacaggtaagcgaaggcgaccgctggcagccgaccgcgattgtcgaagagctcaaggccaaggcgaaggccgaagggttgtggaacctctttctgccggattccgaactgggtgccggcctgaccaacaccgagtacgcgccgctggccgagatcatgggcagctcggggctaggcccggaggccttcaactgctcggcgccggacacgggcaacatggaagtgctggtgcgctatggcagtgaagaacagaaaaaacagtggctcgagccgctgttgcgtggcgagatccgttcggccttcggcatgaccgagccgggtgtggcgtcgtcggatgcaaccaacatggaagcgcgcgcggtacgtgagggggacgagtgggtcatcaacggtcgcaagtggtggacctcaggtgcctgcgatccgcgttgcaaggtgatgatcttcatgggcctgaccaacccggacgcgccgcgccaccagcagcattcgatgattctcgtgccgatggatgcgccgggtctcaaggtgctgcgtccgctaccggtgttcggctacgacgacgcgccgcacggtcacgccgaagtgctgctggagaacgtgcgggtgccgtacgagaacgtgctgctcggtgagggccgcggtttcgaaattgcccagggtcgcctcggcccaggtcgtattcaccattgcatgcgttcggtcggtgtcgccgagcgggcgttgaagcttatgtgcgagcgctcggtgaaccgcaccgcgttcggcaagccgctggcgcgactgggtgccaacctcgatcacatcgccgagtgccggatcgagatcaacatggcgcgcctgttgacgctcaatgccgcgtacatgatggacacggtgggcaacaagattgccgcgagcgagattgcgcagatcaaggtcgtggcgccgaacgtcgcgctgaaagtgatcgaccgtgccatccagatccacggcggcgccggggtttccgaagacttcccgctggctcattggtgggcgatgcagcgcaccctgcgcctggccgacggcccggatgaggtgcaccgcgcgtcgatcgccaagcacgagctgggcaagtacttcccccgtgagatgctgcgtagccgctaaagcgccggtagctccgagcagcaggagcaagcagtcgtaccgagcaaataaaagcaaagccacgcgagtggctttgcttttttatgcgctgttatcagtgcggcttaccgggaggtcgttcgagaacaagcttgctgccatggcggcccactttgtaggagcgagctctgctcgcgaacgggctgtaggctacggtcgtaccgccgcacctgcctaggcttcaggcgcgcttatggcgccactgtgctcagatccggtgggttttgctgaccgtaggtggccgcaaccaactgtcggtagcgccggtaggcctgctcataggcattgaccgcattggctgacggctcgacagcagtcgcctcgtcaacactgacgcagcgctcgcacagtacttcgaggctggcttcagggtcgctctgtcgcgcatggcaccaggcggcctggatcgccccacccagcgcggcggcttcgctgtggcgggtgcagaccaccggggttgccatcatgtcggcgaccatctgccgccacagcgggctcttcgcgccgccgccgatcagctggatacgctggctgcaaatcccgctgtcacgtagcagatccagcccgtagcgcaggccgaaggtcacgccctcgatcaccgcgcgacacagattggtgcgggagaggttgtctgcggtcaggccatgcaggctggctgttgcctggggcagggcgggtacgcgttcaccgttgagaaacggcagcatggtcacgccttcagcgcctatcggcgcctcggccgccagcgcattgaacgcctcgagatcaagctgcaacaggtcccggatggcgccgtttgcgttggtcaggttcatggtgcagatcagcggcagccagccgccgctggatgaacagaaggtggcgacggagggctgcgcgctgatacgcggctggtctgcataggcgtagagcgtgccggatgtccccaggctcatggtgatggcgcccgggcggatgttgccggtgccgatcgcgcccatcatgttgtcgcccccaccgctcgatacgatggcttgcggattcaagcccaggcgcttcgccagcgctgggcgcagccggccaacgggctggtccgactcgatcagctccggcaatgccgcttcaaggcgaccgactggatctatatggcgcaggattgcgcagtcccattcccgggtgcgcacgttgaaatagccggttccggacgcatcgccgtattcgctgcagcagcggcccgtgagccagtagttgagataatcgtgaggcagcaggatatgagcgatgcgctcgaacagctgcggatgctgttctttcatccagagcagcttggaaacggtatagcccggcgcgatgaccacaccgagacgctcgagcgaaccccgttcgccgcccagccaatcgagcaggcgttggttttcgttcgctgattcggtgtcgcaccagagcttggccggccgcagcacctggccatcggcatcgagcgtgaccaagccatgctgctggccggagaccccgatgccgagcacttggctcccgtccacgcccgcttcggccagggccgcggcggtggccttttcgaacgctgaagtccattgctcggtgtcctgttcgcgacgcccgttcggcccgctgatcagttcatggctggccgaaccctggcccaggacacgcccgctgtctgcatcgagcagcagtgccttggtgccctgggtcccgcagtcgataccgagatacatggagcagccctcagcgcgtcagtaacagatcgagcgtcccgctgacacccagcgtgcgcagcctcagcaggttgcgctcgaacgcatcgcggaacgcgggcgagcgtggaatctggctgccgaagatttcttcacgacccagcaaccgctcggcgagtccttcgtcttcctcgaccagcgcctggcagaactcggctcgtggatcgggaatccggtaacggttgccgttttcgtcgacgccgcgcaaatacagcgcccacgccgcgacgaccagcgccgcccggtccagctcggcgttatcggcgatcaggcgattgatggtcggcaccgtgaacttgggaaacttcgacgagccgtcggagcagacccgctcgagctggtcggcaatggcgcagttggagaaccgctcgatcagcgtctgcttgtactcggtcaggtcgatgcccggcaccggcgccaactgcggcgtgacgtcatcgtccatgtagtggcggatgtactcgacgaacagcggatcggccatggtctcgtgcacgaagcggtagccgcgaaggaatccgagataggtcagcgccaggtgactgccgttgagcagcttgatcttcatctcttcgtagggcgcgacgtcatcggtgaactgcacgccgaccttgtcccaggcaggccgaccggcgacgaacttgtcctccagcacccattgcacgaacggctcgcagaccactggccaggcgtcgtcgataccgtgctgctgcctgaggttcttgcggtgcgcggcgctggtcatcggcgtgatgcggtcgaccatggcgttgggaaagctgacgttgctgtcgatccattcagccagctcgggatcgaccaggctggcgaaagccagcgtcgccttgcgggtgacgtcgccgttgtgcggcaggttatcgcaggacatgacggtgaaagggggcgtgccttgaccacgacgtttggcgagcgccgcgcagattaggccgaacacgctgatcggagcgcgtgggttttccaggtcatgctggatgtggggcagcgcggcgttgaactggccggtgctgtcgtccatgcagtagccgccctcggtgatggtcagcgacacgatgcgaatggcggggtcggccagccgggcgaccactgcctcggagccgtcctcgccgaccagcagcatgtcgcggatgctgccgattacgcgcacttcggtatccgggcgatcgtcgagttcgaccagggtgtagaggaaatcctgcgaggccagggcatcacgcatgccctgctcgtcggtacgcgtgccgatcccgcagatgccccattccaggccttcgccgacgttcatcagcgcatcggtataggcggcctgatgggcacgatgaaaaccgccgacgccgatgtgtgcaatgcctgccgtgaccgcctcgaggttgtaggccgggcgggcaatgtggtccggcagctgcggcaggttctgttgtttcagcttcatgtcaggcctcgctgggcgtgagaaagggaaagccggcggcgtaatcgctgtcgtgatggcagcgatacgtcggcgggcgggttgttcctgaagcggtttggctgtcaggcgacctgctgcagcggttggccgaccgccagcccattgctgtcgaacaggtggcagtggctggcatccagatccagggtcaacggctcgccataacgcggcgtgaaatcgccgcggatgcgcatcgtcagcggctcgccggtctgggtaatcacgtggcaataggtgtcgctgcccagtcgctcgctgacgtcggccttgacggtcaactggcaattgcccgcgctgccgcggttgagatgctccggacgaatgcccaaggtaaccgggtcgcccactgccattgatccaccgccaagcgggagaaacaggcgacagccggcttccagttcgacctccacgccggcagcttcggctcggctgatccgtccgcggaggaaacccatcttcggcgtgccgagaaaaccggcgacgaacaggttggccggatggtggtagagctccatgggtgaaccgacctgttcgatacgaccgccgtttagcaccacgaccttgtcggccagggtcatggcttcgacctgatcgtgggtcacgtagatcatcgtggcctgcagttcctgatgcaggcgcgacagttcgaggcgcatctgcacgcgcagcgcggcatcgaggttcgacagcggctcgtcgaagaggaacaccttaggattgcgtacgatggcgcggccgatggcgacgcgctggcgctggccgccggagagctggcgcggcttgcgttcgagcagcggctccagctccagggtgcgcgctgcggcttcgatcttgcgcgccacttcctgcgtgtcggcaccggccaggtcgagggcgaaggacatgttcttgcgcaccgtcatgtgcggatacagcgcgtaggtctggaacaccatggccaggtcacgcttggccgggctgagatcggtgatgtcccggccgtcgagctcgatggtgccgctgctgacttcttccagcccggcgatcagccgcagcagcgtggacttgccgcagccggatgggccgacgaagacgacgaattcacggtcgcggatatccaggtcgatgcccttgatgatctcgttgccgtcgaagcccttcttcaggttgtggattttcaggtctgccatgttcgaatcctctgttgttcttgtcggtcttgttgatacggcggcgcgctatttcacggcgccgaacgacaggccgcggaccagctgtttctggctgatccagccgaatatcaggatgggtgcgcaggcgagggtggagacagccgaaagcttggcccagaacagcccttcgggactggagtaggaggcgatcagcgcagtcaaaggcgcagcattggacgaggtcaggttcaacgaccagaaggcctcgttccagcacaggatcaacgacagcagcatggtcgaggcgaggccgcccttgctgatcggcagcagcacgcgaaccatttcctgcatcagcgtggcgccgtccattcgcgctgcttcgaggatgtcgcgggggatgtccttgaagtaggtgtagatcatccacaccaggatcggcaggttgatcagcgtgtagatgacgatcagcaccgtgcggctgtcgagcaggccgaactgcttggccagcagatagatcggcaccagcacgcccaccggcggcagcatcttggtcgagagcatccacagcagtgtgcccttggtccgcttggtctcgtagaaggccatcgagtaggcggcggggatggcgatcagcatgcccagtgcggtggcgccgaaggagatggtcaccgagttccaggcgtacttgaagtagccgctgcggtcctggatgtgcaggtagttctccagcgtcggcgtgaagatgaattgcggcggtgtggcgaatgcgtcgatctcggtcttgaaactggtgagaatcatccagaagatcgggaagaacagcagcagcgccacggcccaggcgagcagcccgaccactagggtattgaggcggcgactttgtttgagcgtcagcatcggtctgccctcagtatttttcggtgagattcttgccgagcatccgcaccaggatgatcgccgcgatgttggcgatcaccaccgcgatcagaccgccggccgaggccatgccgacgtcgaactgcagcagcgcctggttgtagatcaggtaggcaaggttggtcgaggcgtagccgggaccaccgctggtggtggtgaagatttcagcgaagaccgacagcaggaagatcgtctcgatcatcaccaccacggcgatggggcgcgccaggtgcggcagggtcaggtgccagaagatcgcgatcgggccggcgccgtcgaggcgggcagcctccttctgttcctggtcgagggactgcatggcggtcataaggatcaggatggcgaagggcagccattgccaggacacgatgatcacgatcgatgccagcgggtgctgtgccagccagtccaccggctgcgcaccgaagaacttccacaccgcggcgaggatgcccgacaccgggtggtagatcaggttcttccagaccagggcgctgacggtcggcatgatgaagaacggcgaaatcagcatgacccggacaatgccgcggccggcgaagtcggccgcctccagcaatgcggagatcagtacgccgagcacgacgctgatcagcagcacgctgccgaccaggatcaaggtgttgatcatgccgggcatgaagcctgcgtcggtcaggaagtagtgaaaattctccagcccgacgaagtcgttctcgccggggtagagcaggttgtagcgaatcaccgagaaatagacggtcatcgccagcggcaccagcatccacagcagcaacagcgcaacggacgggctgacgaggaaccagctgggtccgaaccggcgcggctggcgcgcgttcgattcgcttgccgtatcggaaagggaggccttgggcaaggctgtcgaaggggtagccatggacgtgctccgggtgaaggaagaccatgagggctcgggcgagccctgtccggtgggatgccttggcgtggcctacttggggtagccggcgcgtttcatttcacgagtggtcgattgctgcacagccgtcagcatctgttcgaccggcatctgcccggtaagcgcggcggcgaacatcttgccgacctgggtgccgatggcctggaactccggaatggtgaccagctggatgccgacgtagggcacgggcttggccgacggagaggcggggtcagcctgcttcaacgactccagggtgatcttggcgaacggcgcggccgccatgtattgctcgctgtaggtggactcgcgggtgcccggcgggacattggcgacgccgtcggtcttggcgacgagcccggcgtagtctttcgaggtggcccaggcggcgaacgtcttcgccgcgtccttctgctgcgaactggtgggaatcgccagtgcccaggagtacagccatgccgatcccttgtcggtcgtttcgtgcggggcgaaggtaaagcccaccttgtccgcgaccttgctctgcgattcgtcggtgacgaaggagcctgccaccgtcgcgtcgacccacatggcgcatttgccgctgttgaacagggccaggttctcgttgaagccgttgctcgacgccccgggcgggccgtacttgctcagcgtatcgacgtagaacttcgccgcctgggtccattccggtccggtgaattcgggctgccacttctcgtcgaaccagcgcgcgccgaaggcgttggcgacggtggtcaccagcgccatgttctcgccccagccggccttgccgcgcaggcagatgccgtactgctcattccccggcttgtgcagcttttcggcgaaatccgccatctgcgtccaggtgggatgctcgggcatctccagacccgcctgttcgaacaggtcggtgcggtagtaggtcatcgagctttcggcgtagaacggcagcgcgtacagggtgccatcgaccgacagcccttcacgcaccgaggggaagacatcgtcgaggtcgtagctggcgggcaggtcggtcatcggcgcgagccaacccttggcgccccagagcgaggcttcatacatgccgatggtgagtacgtcgaactggccgccctgggtagcgatatcggtagtcaggcgctggcgcaggacgttttcttccagcaccacccagttgagtttgatgtcggggtacttctcttcgaaggtcttggacaagcgctgcatgcggatcatgtccgcgttgttgaccgtcgcgaccgtcagggtttcggcagcctgggtcacgccgagcgaggccatgcaggcggtgccgagcagcaagtgtgaaatcttcattcctgaactcctcttccacagcggagcggtggaagtcgcttattgtttttgttgttgcccgcgtacttcgctacgagcggctcgcaggcattacaacgccggcagcagcaaggcgacaaagccctgactgcactccgttcgatacatttttgcactgcgtctgcatccgtgccgtgccaggcttgaggcgcgctctatccgttccgggcgctcaagcatggggcttatccgcgctttatggcgctcggatgatcggattggggaagcccggatggtccagggcagcggccggaagcgtatcagctggccaggttctgctcggtcagtcgctgttcgaccaggcggcggtagcacgaaggcgtcatgcctttgagctgctggaagcggcggttgaaattggacaggttgttgaagcccgattcgaagcagatatcggtcaccggcttttccgggtccagcagcagctcgcaagacttgctgatgcgcaggctgttgacgaactcgacgtagcaacggcccgttgcccgtttgaagaagcgtgagaaataggtgggtttcatgcccaagtggctggccacctcttcaagcggcaattcgcgcatgtaattgtcgaagatgtagttgaccgccatgttggtgcgatcggcgtgatgctcgtcgctcagctgcgccgaggtcgcacccgagagcaggtgataatcgtcacagcgtgccagcagctcgagcataatcaggaaatagccgaggcgggtggcgccgcggctgtcggcgatctgctgcatgagttgtctcgcctgggcgatggtgtgcgggcaacgaaactcgatcccgtagcgggagcgctcgagcattggcgcgaagctgcgcagttccgagaagacgttgtggcccgcctcgaacagttcgtcggtgaagttgaccagcatgtcgcgcttggccaccacttcgccttcccctacctggctgatccagttgtgcggcaggtgcgggccggtgaggaacaggctgtccgggctgaagttgccgacgtaatcgccaacgaagaccttgcccgagctggcgacgatcaggtggagttcgtactccttgtggttgtgccagcgcaccagcggacaggggaagccgtgctcccggtagatcagtgaattgccgtgatggtcgtccatcagctcataggatggatcggtgatcttcagcgctttcatgctcggttccggcgtccttgttgttgtccccttggggttatagacgttcgcgccgttgccgccaaccggtcaggcaaattcgtatcggtggggcaggtccggaccgcgacgggagcaggtgagcgctgcagcctcgaccgcgaatgccagcagcgcctgcgactgctcgcgggtaatgcctgccagcgcagtcggcgaatccagccggtgttcatgcagatagctgaggagggcggcctgaaaggagtcgccggcgcccacggtatcgcacagggtgatggtccgtgccgcttcgttcagctcgccgtgctgccggctgaacagctgcgctccggcacccccgcgcgtcagcagtaccagctcgctgccgccctgcagccagcgtcgcgccacgttctcaggggtttcgccggggtagagcagtgcgaggtcttcgtcgctgaccttgatcaggtgagcccgctcggcgaaggcttcgatccgctcgcgccagcgcagcacatctggctcgacgttaaggcggatgttcgggtccagggaaatcagccgacgcccgttttcgcggcgtaccagcgctaacagcgtatcggcgatcggcgtggtgaccagcgaataggagcccagatgaatgccgcgaacctcgtcgccaagcacgccgagatgctcgtcacgcggtagccgatcggcgcagccttcgccgcgaaagctgtagctcggcacgccattgtcgcccagcgccaccatggccagcgtggtcggcgcatcgaagggcaccagatagcgctcttcgactccttccttgctgagcacctggcgtaactgctgtcccatggggtcgctggagatgccggtgaacaacgcgcagcgcgtacccagcctggccagcccgactgcgacgttgaacggcgagccgcctgcgatcgcgtcgagcgtcaggcgattgtgagcggtgccggcaggcgccatgaacacgtcgaacagggcttcgccacataccagatacatagtcgttcccgcgctgattatttcccagagcttagtcgcgacccgggggccgggaatagtacgaggcaggcaagcggctgatacgattttgccgcttcaatacacccagacctcgacgcgcctgttcttgatgcgtccggcttcgctgttggacgccaccggcagctggtcgcccaatccgttgatatccctgacgagaatgccgccacgcgacagctcccgccgcaccgccatggcacgtagtttcgacagcagctcggtgcgcgccgtatcgcctttcgcgtcgccgaaacccaccagtactgcggagtccatggttttgttcgtgcgcttcagatagtcgatcaggcgtccgatgtcacgctgggctttgttgtccagctgcgcgctaccttcctcgaagcggaagttgaccgtcagccgctgcgcctcgctggacagggcctggtagagcggcggcatgccgggctgtggcggaagcttgatggcgttgatggcctgcgcgacgtaaccggattgcgccacgatcgcttgcccggccgggctgtgcacgaattcgagataggcgcgggtccagtccgattggtggcttgggttggcgtagaagaacaggcgccgggacaacgggtagtcctcggtcgcgaccagtgcagttgagggcggcatcggctgcgagtcgccatcggctatcgccacggctttagagctgcccaccgaggcgaggccgacgaaaccgatcgcgccagggctgctgctgaccatcttcgatagctggtcgttggattcgtaacgtgccgcgttctcggccagcgtcttgttctgccggccgagggccaattccttgaatgtatcgtaggtacccgattggtcatcgcgggcatgcaactcgaccgcgaggtcctggccgcccagctccttccagttctttaattcgccggcgaacaagcgcgcaacctgctcgacgctgagcgaggcgatagcattacttggattgacgatgatcgccaggccgtcgatcgcgatgacttgttcagcctgagcgctacgtaggtcgccgagtttggcaaggctttggcgttcgctgtccttgatcgggcgggaggcggctgccaggtcggcggaaccgtctttaagtccggagaagccggtgcccgtcccgtgggctgcgaccagtgcgtggatcgtccggccggaactgtcgacggcgctgatgcgctgttcgttctcgcgtccggccggggtaacgcgtaccgaacccatgccctgcgcttcgaacaggccggcaatcagcattggcgccagttttgcccctacggtgttcgatccctgtatccgcaacacggcttcgtcatcgccgtcggcggcgagcgctgtcacggcgccattgatgatcgctgcgctaacgatcaggctgagcaatgccaggcgcagcgcccgttttcccagggtgcgtacggacgcggtacgggccatgtagcgactctccctatcaaaagaagcggagagattaagacgctttgattaccgtcccgtgacagcgcggtgcctgattccagagcgggcgccgccaggggcgcggtcagctgagtgcgatccagaccggacagtggtccgaaggtttttccatgctgcggatgtcgtagtcgacaccgcagtcggtgactcgctgatgcaggccggcggtggtcaggatcagatcgatgcgcagcccccgacgcggatcatcctcgaagccgcggctgcggtagtcgaaccagctgaagcgatcgaccacttccgggttgagtgtgcgaaagctgtcctgcaggccccagttcttcaagcgcgccagccactcacgctcctccggcagaaagctgcacttgcccgtgcgtagccagcgcttggcgttcacttcgccgatgccgatgtcgcaatcctcgggggaaatgttgaagtcgcccatcaccgcaaccgagtcttcaggcgtgaagcgctcttcgagcagcgcctggagatcggcgtagaacttggttttggccggaaacttggtcggatgcgcgcggctttcaccttgcgggaaatagccgttcatcacggtgaccggctcgccattgccgtcggcgaatcggccccagatgaagcgcttctgcgattcctcgccgtcgcctgggaagcccttgtggatctccagcggcgcctgccgtgacagcagcgcgacgccgtaatggcccttctggccgtggaagtggacgtgatagcccaacgcttcgatctcggcctgcggaaactgctcgtcagcgaccttggtttcctgcagaccgatgacgtcgggctgatgcttttcgatcagtgccgccagctggtggggtcttgctcgtaatccgttgatattgaaggaaacgattttcatggctgcggactctttaaaaagccgggattttaatcgtttcgcgctacccggggcgaatcgtgttggccggggccgccctgtccgcgctcgaggcggcgcgagtgcatggccggtgctaacgtgaaatcagcgcttacgacagaacgaccagaagagaaccgtcatgccgatgcctgctgaagtacgactgctggacagtggttacgccagggaagcccgctcattgctgtacaacgcttatcgacacgagcccacctttgcctatctattcgaagccgatcgacccggctacgaccagcgcgtgcgggcgaccgtacgtgagctggtcaatcagcacctgctgcaggaccagcccgccctgggcttgctgctcgatgatcggctgatcgccgtcgccctgatcgccccgccgcagcggcgtctggatgtcaccgagagctgggcctggcggatgcgcatgttgttgaccgccggctttcgctgcacccgacgttatctcgactaccatgccgcggtgctcggttgcctgccgccgggcgcgtttcatgtgctgccgctgatgggtgtccacccgcagtttcaagggcagcattatggtgagcaactgctcgaggcgctgcataactggtgcgcggcggacacggcatcgcaagggctggtgatcgacacgggtaacgctcgctatctgaatttttacgagcgtcagggctacgaggacatcggacaggtggcgatcggaccggtagtcgagcatgtgttcttccacccggcgccacgtcgagtcgaggccagcggcggctaaagccgaattttgccaaggcctcgcagtccaatcggtggatgcccgacgaagttcctttcatgtactgcctgatgccgcttccaacgaaccgtacgcggcgcagccagcccgagcgccggtgcgcgtcgtgctagcatcgcccgccatgcgcttaccccttattcgtcgaatccttctcctcggcgccagcctgttcgcctccatggcggtctgctcggcggaactcgaggtgatcatcgaaccgtccaaacgtgctctgcgggaaaacgtcgagaactatatcggcagcctgggtgatcgcgacgagcaggagctgttgcgttacagccgcattgcccagcagcaggcggagaaggcgcttcaggcgctgggttattaccacggccagttcgacagcgaagtctccggcggcgagaacccgcgcttgaccctgcgcatcctgccgggcgaaccggttcggctgcgcgacatcacgctgcgtgtagaagggccagccgccgagctgagccgctttcgcgtgccgcgcaaggtgctcaatagtggcgacgtgctgaaccatggtcgctacgaagaggtaaagcagcagatcctcaatcaggcctcgcgctacggcttttttgacgggcgcttcgaacgccaacggcttgccatcgatcccgcggtgaacgctgccgacgtcgagctggtattcgtcagtggcccgcgctatgtcctcggcgaggtgcgtttcgagggcgattcacccttcgatcccgatctgctggcccgcatggtgccgttcgacgccggcacgccctacgattccgagctggtcgcggagctgacccaggcgatgcagtcgagtggctatttcgaaggggttagggtcgacgccaatccggcgaatgcccagcagcagcgcattcccgtggcggtacagctgaccacccgtgaaccgcggacactgggtatcggcctgggcttttccaccgatgtcgggccgcgcatgcgcttcgacttcctgcgtcactgggtcaacgccaaaggccacagctacgggctggaaaccgagctgtcggcgccgcgccagaacatcggtctttggtacgacgtgccgttggaccccccgctgaccgataagctgcgctatgcaggcggctatcaattcgagcaattggccgacagtgacagtgaaagccggctgctgacggtcggtcctgaatggcaccgcaagctgcccagcggctggcagcgggtctgggcgctgaaatggcggcacgaacagtaccagttgggtgatgactcgggcatcagcaccttgctgatgccgggcgtcgcctacagctatctgcgtagcgacaaccgcatcgatcccagccgtggctatcgcctcgagttcgagctggccgcggccaaggagggcctgttgtccgacgccgatctgatccacgcgaacacgacgatcaagggcctgatcacccttgccgggcgtcaccgtttccttgggcgagtgcaggtcggcggcaactggaccaacgaatacaccaatgtgccgccgtcgttgcgctatttcgccggtggcgatcagagcgttcgtggctacgactatcagagcctgtcgcccaccaattcggatggcgacaaggtgggcggacgctatcaattggcggtcagtgccgagtatcaatacgcgctgacggacaagtggcgcgtcgcatccttcatcgaccagggcaatgcgttcaactcgctggagctgccctcgctgaagagcagcgtcgggctgggcgttcgctgggtttcaccggtcggcccgatccggatcgacctggcgcatccgctggatgacgagggcggtgtgcggctgcacttctccatggggccagagctttgaggcaaaccctgaaaatcctgggctgggcatgctcgggcctgatgctgctggtgctgctgatcgctctgtcggtaggtgcgctgctgggtactactgccggcagtcgctgggtactggccaaggcgccaggcgtgcaagtcgaggagttccgtgggcgtctcggcggtgagtggcaggcgcagcgactggtgtgggagcaggacggtagccgtgtcgagatacagtcgccgcgcatggcctggtcgccgctatgcctgctgcgcatggcgctttgcgtcgacgagctggtgacgggcgatgtcgatctgacgtttccctcgacggccgaggacgacaagccgaacgagccgttcagcctgcccgagctcaagttgccgctggagctgcgtgtcgagcgcgtccagatcggcaacctccgactgaatggggtcgaacaactccagggcttacagctgcgcgcgaactggcagcggcaggggctagacatcgatgcgctggaactgcggcgcgaagacctgatcctggacctcggcggacagctacaacccgatggggactggccgttgaggctgggcggcactgcggccttgcgctcgccagatgggcaaccttgggcgctgaagatcgaagttgacggcgagctgcaagagcacttgatgctgaacatcgaaagccagggctacctggacgccaagctcggtggtcggatacgccccttggagccgtcgttgccggcgaaactggggctcgtggtcgagggcttcaaggcaaccgcagcgctgcccgacgcgctgcggctcgaaacgctggagctgacggccgaaggcgacctcgaccgcggctaccggatggtcggcgagggccgtcttcagggcgagggcggtgcggtcggtctcgtcttgaacgctctgatcgacgcgcaacgggcgcaggtcgatgcgttacgactggacgctggagccgaccagcggatcgacatcagcggacaggccagctggcaggatggggtgacgggcgaagcgcaattgacgtggcgcgatttcccctggcgtcggctgtatcccgaggtggacgaaccacccatgacattgcacagcctgaacgctcagattcagtacgacgacggacgctatctgggcaatttcgacgcggcactgaccggcccctcgggtgagttcagcctgcagagcccggtcagcggcaacctcgaggaggtccatctgcctcagttggaattgcgcgccgggcagggcaaggccagtggcagccttagcgtcggcttcgtcgagggcatcgactggaacactcggcttacgctgagcgagctcgatccttcctattgggtcgccgaacttcccgggcagctcggcgggacgctaaacagccgcggcgccctgcgtggagagcgactggaggcccaggcgcaactggacctcgatggccggctgcgccagcaaccgttgaatttgcaattggaggcaagcgggcagggcgcggtctgggacgttccgcgccttgacctgcgcctgggcgacaaccggatccaggggcacggacgctgggccgaaacgctgcaagcgaacctcgaactggatctgaccaggctcggacagctctggcctgatctacgcgggcaattggccggtgatctcgaactggccggcacgccccaggctccacagggcaatttggcgctggaaggcagcaagatcgccttccaggacaatggcgtgaaccagttgcagctggcggccagcctggcaggcgacgaacgtggccagctgcgcctgacggctgagggcctgcaagccggcgataccgacctgggccgattgcaggtcagtgcagcgggtacccgacaggcccatcagaccgagctggacctgcgcggcccgttgttgcagctgtccctggcgctggaggggggattacgtggcgacgattggcgaggccgtttgtcgcgtgccgagctggacgccaagggacagcaatgggcgcttcggcagccggcgaccctggagcggctagccagcgggcgcctcaccttcggcgcgcactgctggacttccggacctgcctcgctttgtgccgaaacccagcggctgcttccagacccgcagctgcgctacaagctgcgcgactttccgttgcaatcgctctccgcttatttgcctgacaccttggtctggcagggcgaggtcaacgctgatgtgtccctcgacttgccaagtaccggccccaatgggcgcgttcatatcgatgcggggccgggcacgctgcgcatgcgcgacggggaccagtggctggcctttccttaccagaccctggcgctggacagcgaactgacgccccagcgggtcgacggccgtgtgcgcttcgaaggcggcgagctgggtgagctggacctgcgtctgcaggtcgatccacggtccgaggcgaaggcgctctccggcaatttccgtttgagtcgtctcgaccttgcggtggccaggcccttcattcctcaggtagatcgcctgagtgggcagctcaatggcagcggtgagctgtccggtaccttgagccagccgcaagtcaatggtgagttgcgactgagcgacgctgaaattgcgggcagtcagttgcccgtcagcttcgagcagcttcagcttcgcgcattcatcgaaggcgagcgtgtacgcgtcgatggcgactggcgcagtggcgagcagggccagggaacgatcgccggcacgctagattggcgagatgcgctggatctggacctgcaggtgagcggcagccaactgccggtgatcgtcgagccctacgccgaactggagatcgagccggacttgcggatcgagctggccgaccagcaactggcggtaagcggcaaggtgcgcgtaccgcgcgggaaaatcactgtgcgtgaattgccgccctcgaccgtccgggtttccgaagatgcgcagatcgtcggagaagaagccgagcaagccgagatgccgctggccattcggatggacatcgatgtggaggtgggccaggaccgactgcgattctccggcttcggcctcaccgccgatctggccggccatctgcacatcggtgacaacctggacacccgtggcgagctcaatctgaacaacgggcgctatagggcctacggccagcgtctgacgattcgccgtgcgcagttgctgttcaccggtgtgctgtcgcaaccgtttctgaatatcgaagccatacgccggatcgagtcggacaacgtgattgccgggcttcgcatcaccggcagcgccgaacagccccgggtggatgtgttcgccgaaccggcgatgagtcaggagcaggcgttgtcctacctggtgctgggtcgtccgctgggtgccgaaaccggcgataacaacttgctggcgcaagcggccttgggccttgggctcgctggtagctcgtcgttcaccggcaatgtcgctcagcggctgggcattcaggacttccagctcgacaccgaagggagcggcacggataccagcgtcgtcgccagtggccgactgaccgataaattgacccttcgctatggcgttggggtattcgagtcggccaatacgatcgccctgcgctatcaattgaccaagcgcatcttcctcgaggccgccagcggcctcgccagttccctggacatcttctaccggcgcaacttctgatccggcgcagcccgcaggtacgatcgaaaaccgcatcgattggctggcgatgcggcgccgctgggctacgctgactgagcttacgtaaccggcaatccagcatcaggcgcagtcccgtaaagagcgtggcgaaggtcgctgtaaacggtgccgcgccaagcgcttgcagtggtggtaggatcgctcggtcgcatcttgcatggcggctgacgcaaggctctagcatgagttttgcaggttaccggtagtacccagcacatgaggtgggggcattaccgagtcgcttcgtaacggttggaggacgacgtgcacgtcgcactctatgccgctcggtgcgagccgctcgggcaaggatgtctaacataattaataagggtgccttgaatggaattcctgcaaaacctggtcaatagcgttaacggtctcgtctggggccctcccatgctggtgctcattctcggcaccggtctcttcctgatggcgatgctcaagttcatgccgctggcgcgtatcggcaccggcttcgcactgatctggcgcggacgcacgaaaggcgacgaagaaacgggcgagatcagtccgttccaggcgctgatgacctgcctggccgcgacagtcggtaccggcaacatcgccggtgtggccacggcgatcttcctcggcggccctggcgcgttgttctggatgtggtgcaccgcgctggtgggcatggcgacgaagtattgcgaagtggtcctggcggtgcattaccgcgagaaggatgaccgtggcgagcatgtcggcgggccgatgtacgccatcaagaacggtctgggcaagcgctgggtatggctcggcggcgccttcgccatcttcggaggcctggccgggttcggtatcggcaacatggtgcaggtcaacagcatggcgctggcgctggaggccacgttctccgtgccgctttgggtcaccggcctggtcaccatgctgttcgtcggcctggtgatcctcggcggtatcaagcgcatcggcgccgttgctgccgcgttggttccgttcatgtgcgttgcctacgtcatcgctggcatcgttgtactggtggtgcatgccgctgagattccgcatgcgttcgagctgatcttcactcacgccttcactcccatcgccgccacgggtggttttgccggtgcggcagtgatggcggcgattcgcttcggtgtggcgcgcggcatcttttccaacgaggccggcctcggaaccgctggtatcgctcaggcagccggcactacccagagctcggttcgctccggcttgatcggcatgatgggcacgttcatcgacaccatcatcatctgctcgataaccggtctggccatcatctgttcaggcgtctggactggcggggagagtggtgcggcgctatcggctgccgctttcgaatcggccatgccgggcatcggcggcgcgctgctgaccatcgctctggtggtcttcgcgttcaccaccatccttggctggagctatttcggtgagaaatgctgggagttcatggtcggaaccaaagccatttggccgttccgggtgatctgggttctggccgtaccgttcggcgccattgctcagctggacttcgcctggctgctggccgatacgctcaacggcctgatggcgatcccgaacctggtgtcgctgctgttgctgagcccggtcgtagccaagttgaccaaggagtatttcgctcgcaatcaagcggcgtgatcaatccgggccgcagatgcgtttgcggccctcgaccttaggagttgatatgactgaagtaaccctcaaaggcaatccgatccaggttgccggtacgttcccgcaggcgggacagaaggccaagccgttcagtctggttggcggggatctggccgatgtcacgctggacagcttcgctggcaaacgcaaggttctgaacgttttcccgagcatcgataccccgacctgcgccacctcggtgcgcaaattcaacgcccaggccaacgatctggctaacacggtcgtcctttgcatctctgccgatctgccgtttgcgcagaagcgcttctgcggcgcggaagggttggacaatgtcgtcaacctgtcgaccatgcgtggccgggagtttctcgaagattacggcgtgctcatcgccacgggtccgctggctggcgtggcggctcgcgcggtgatcgtgctgaacgagcaggaccaagtgctgcatagcgagctggtggcggaaatcggcacagagcctaactatgacgccgccatcgcggcgttgaagggctgaagctgacggctaccacacatgatagggggcggtgcaatgccgcctcctttacgtcttggctctggcgacaaaaaatcaactttcgtctcctttcttgcagccgttaatcaattggctggatcgcgctcttaacgcttagcttggaactgtccaccgctccatgagcgcagctggggcaggcgatggctttaggccagattatttttattgctacaaaatcttttcctgccgctgcggtctgagctttcgttgcccattgaatggattcgcttatgtctacctcacacatcaagaagatcggtgtatccggcacaggaatgatcgcccattgtttcatccggctgatcaagcagcattaccaggatctggaaattacctgcgtattgacccgccgcccgctgaattccttcagcgatttcccgctggccgaccgtctcacgaactccatcgaccagatgatcgataacgccgatctgatcgtcgagtgcagtggtgatgtgttccacggtacggaagtcatcgagcgcgccttcgaagccggtctgccggtggttaccgtcaatgcggagctgcaagtcaccaccggctcctatctcgccggcaaaggctttctcaccgaggctgagggtgaccagccaggctcgctggcggcgctgcacgaagaagccttgatgatgggcttcaagccgctggtctacggcaacatgaagggctatctgaatcacgatccgacgctggaagacatggcctactggtcgaagcgtcagggcatcagcatcgatcagaccacctcgttcaccgacggcaccaaggtgcagatcgaacaggtgatcgtcggcaatggcctcggtgcaaccattacccggcagggcctggaaggcctggcctcgaccaacctgaccgaaaccggcaatctgctgggcatgatggccgagcgtctcgggcaacccttcgtcgattacgtcattccatctggctatccggcgggaggcgtgtttctcgtctgccgacatgacgaaaaccagcaggccgccattgagtacttcaagctcggcccaggcccttactacaccctggttcgcccgttccacctgtgctcgctggaagtcggcaagaccgtaaggcgtgtgctcaacggcggtggcgtgctgttgaacaactcgaccgcaccgacactgggcgtcggcgccgtggccaagcgggccatgcgtcctggcgaactgatcgagcgcggcatcggcgggttccagttccgcggtgaagcgctcaggctcgatcagaatccggatcatgtaccgatcggcctgctgcgaaagacagcgctcaaacgcgccgtcgagccgggtcagctgatcaccttcgacgacattgatatcctgccgagccgtgccctggatatcgttatgcagcagcgtgcagagcgtgctgccgctgcagctcggacagtcgcaccgagtagcgttgggcctgtcggaatggtcgcgctgggtagttgagatagctgtcgagcgctggagtgcggtgccgttccgacgctcgacggatcaccagaccatcaaaggctggaaggcgcgccccgcgtcgaacgcagttgcagggctgcgcttctcgcttccagctttgggctgcaccttccagccgtccccctttgccgtccggctaagcatggcgggatcgccggccacgcttctgtatctggcccggtttggctcgtgcgagccgttgctcaccggttgttgaaggctgctgttgaggagcaccagcggcaacaccctgttgcagggcgttgccgactcctgccagtgcttgctggcgcttcaatcgacttccaaaggcagctcgccttgcggcatcggcttctgcagcccctagtgctgcgacctgggatacaccctagaccgcataccccaacactctcggtagccacagcgcgatttcagggaagatcgccaccaacaccagcgcactgcccatcaccagcacgaaaagcaacgcccagccaaccgtctgctccaggcgtatgcgcgccacttcggcagtgaccatcaggttaatcgccaccggcggagtgaactgcccgatggcgatgttcatcgccagcaggatgccgaaccacaccggattccagccaaagtgctgcatgactggaatcagtatcggcatgaggatcagatagatcgatatcgcatccagcagcatgcctgccaacagtacggcgaccatcaccaatagcagcaacaccgcgccgttgtccgagagcgagatcagccattcggcgagatggcggaaggtgccgagcatcgtgccggcccaggcgaagatgcccgccaaggcgatgatcagcataacgaccccggagataacggccgcctcgccgcagaggcgccacaggttacgccagtccagttcgcgggtgacgaacaggccgaccagcacaccataggtaacgccggcgacggccgcttcggtcggcgtgaaaaggccgctgcgaagaccgccgaggatcagtactggcgcgaacaacgccggcagcgcctggcggaagctttcggccagcggcgggcgctcggtgtgttccggatcttcccagccattacggcgcgacagcagccaggccggcagcagcaagaccaggccggcgatgatcccgggaaacagtccggctgcgaacagtgcacgcaggtctacacccggcacgacgatcgagtaaaggatcaacgcgatcgaaggcggaatcaggatcgccgtggacgcagaagcggcgatcagcgtggccgagaatggcttcgggtagccggctcgggtcatgctcggcagcatcaccatggccaccgcggcagcgtctgcagggcctgacccgctcattccacccatgatcaggcaaaccagtatcgcgaccatcgccagtccgccatggcgcgggccgatcagtgcctgcgcgaagcgcaccaggcgcaatgccacgccggatttctcgaataccagaccggtcaggatgaacagcgggatcgcgatcagtgggtatttggcgaccccgttgtaggtgttggtgccgagcgttgccagcatgtccggcgagagcccggccaggatgccgatggcgccggacaacgccagagaaaaagcgaccggcacgccgatcaggagcaggagcaaaaagctggcgagcatccatgcatcagggctcatcaggcagtctcccgttcagacggtcgagggtcatctggctcagccgcacagccattgccaaccccagcagcggcagccagatcacgtaccaccagttcggcaggcccaggcctggcgactccgaatcccattggtactcctccagtgcgaactgcccgccaaaccagatcaccaacccgaggaccagcatgctggcgatccactgcacgacgatcagcggagtgcgcaggcgggggaaaagccgctcgatcaggccgatgcgaatgtggcggttactgcggatggcgacgcttgccccggcgaaggtcaggatgaccagaaggaagacggaaaactcttcggtaaaggcaaaggaggcgtcggttaaatagcggaccacaacgttggccaggctgatcaggctgatgatcaccagcgccagcgtggccagcgcgcgctcaaggcgcgcgtcctgtcgattgttcatggtttcctcgaaaccggcggcgtggcgccgccgggcagaacggtttactcggcggtaatggcggtgcgagcggcgtcgaccagttttgcgccgatcttcggcgtccagttctggtgcacgctgcgggtcgcttcgacgaaggcttcatgctcttcagcggtcagttcgaccacgtccacgccgcgtgcgcgaatgtcgtccagacgcttggcttcgccgctgcgcgacagttcgatttcccacttgccggcatcgatggccgcctgacggagcagctcgcggtcagcttccggcagctgcttccagacgcgctggttcaccgcgaagatcagtggatcggccatgtagtgccagagcgtcaggtgcttttggccgacttggtcgacccgcgcgacgtcgaataccgacagcggattctcctgtccatcgacggcgccggttgtgagagccggcttggcatcggcccagctcatctgcgtggggttggcgcccagcgcggtgaaggtgtcctggaacaacggcgagccgaccactcggatcttcaggcccgccaggtccgcaggggttcgtatcggtttgacggagttggagagctcgcggaagccgttctcgccccaggccagcgggacgatgccgcgcttttcgatcgcatcgaatgcctgcttgcctgcctcgccctgggtgatggcgtcgaggtcggcactgtcggtcatcaggaaaggcagcgagaacaggttcagctccggcacttgcggcgaccagttgatggtcgagccgaccgccatgtcgatcaggcccgagcgcatggccgagaattctttcgtctgatcgccggcgaccagttgggcattggggtaaacccgcagggtgatttcccccttggaacgctcctcgaccagatcggcccatttttgcgcggcctggccccaggggaaggcgtcggagagcacggtggagacggaatactcgcgagcagcggcagagaagctcgcagacaatgtggcagcgacggccagcgcggtgaagcaacgggtcagtttcatggggcgtccttgttcggatcggtcttttggtttttatcggcgaacggccgggcgctggcgaacagcggcgggctcggcaacggcggattggccatcgggacgcgcgggtagcgcgaaaacacgacgcggcaggctgcccaagggtactggcagcgaagcgcatatcgcgtcatgagcaccgaatgccttgtgggcaagggtgtgccagccgcaatgcgactggtcggacaactatcgcagaaggtgtcagtgagcgctatggccggtcgctgtccacgccgaagccgagaggcagccagcgcacgttaggcagcccatcgaggcgcaccgattcagctggccagcgtctccggctatctgggtggcggccacggccccttcgcaggtgagggtgaatcgcccatgctgtatcgaagttcgaggccagcgctcagcctctttccctgcgcatgagccataggaaataagggcaaccgataaacgcggcgagcagccccgcagagactggccaggggtaggcaatgctgcgccccatccagtcggcgacaagcatgatcaaacccccaattaacgcggcaagcaaaagttgcggcacggcgtgacgtacgccgagctggcggacgatgtggggtgcgatcaacccgacgaagctgagcgggccgacaaccagcgtcccggctgcagtgagcagcgctgcgagcatcaggatcgccagctggctcagacgcaagcgcagtcccagcgccgaggccggtcccgtccccagcgtgagcagctcgagcgggcgtgccaggagcaggcttagcggaagcagcagaccggcaaccccgagtgcgactagggctcgcgtctcatccacatggtaggtcgagccggtcatccagctcatcagcatggtcatgcgcggatcaccgctggccatcatcagtgtgctcaacgagccgagcagggtggtcagacagaccccggtgagcagcatgcgctcggcactgaaggcgctgcgccagccgagccaaagcaacaggccgagcgtgagcagggcgccgacgctggccgccgggagcatcagcggttcggggcggctgaccacaagaaacaggaccagcacggcaagcgcggcgccggaactggcgccgagcacctccggactggccattggattaccggtcagacgttgtatcaacaggccggcggccgccagcatggcaccggcagcgatcgccgccatagcgcgtggcagtcgccattgcagtaccggctgcagctgttcgagagaactccagtgccagccgtccgccacgggggccaggaacaacgccaccggtagcagcaggagcagcagcaaaccgacaccggcgatcaatcgccaagtgggcgctattcgacgaccgataccggcgcgtgccggtcgaatgccgccggcacgttggcggctcagcagccaaagcaacagcggcacgctgaataccgaggtgaggatgccggccggcacttcccccacgaagcgcgagatctcgcgggcactctgatccaccaggcagagcagcacggcacccagtaccggcgcccagatcagccgctggcgcaaggtgcgagcaccggtcaggcgagcgatggccggggcggcgaggccgacgaacccgatgatgccgacgcaactggtgacgaaggcgctcagcgccgccgcgctgagcagtgccaggctgcgggtggtgcgtagcgagacgccaaggctggaggcgctttcgtcctccaggccgagcgctgccagcgggcgcagcaggagcccggcgagcagtgctgcgccgagcaggcggggcagcagataggtaacgccgtcccagccgctctggttcagcgagccggcttgccagagcagcaagtcgatcagatagtcgtggttgaacagcaccagcaaggcgttgatggcgttgcagtagaggctgatgaccatgccggcgaggatgaaacgcaatggcgaaagcgtgcgtccccaggcaatggcgaacagcgccagagtcgccagcccagcacctagcagcgtggcccattcgacaccgaaacgcgccaacagccccggcgcgccgatggtaaacaccgacaacgccaggttggcgccgcccgcgacgcccagggtcaccggctcagccagtgggttacgcagcacctgctggaacagcgtgccggccaatccaagggcggcgccggccagcaggctgaccagcagccgaggagcgaaactgtagtgcagcatgacctgacgcgaatcatcgagattcgggctccacagcgcttgccaccagaattcacgcgggagtagcccttgcaggccatgcaccaccaatgacagggcgaccagcccgagcgccagggcccagggcagcgggttgcggtagggctcgccgcgtccggcgggcagggcggtgagggaatcagacatgcggttgactctgcagaaggtagtcggcgatgcgttccgccaggctcagggcggaggcaacgccaccgtagggatagaacttgccgagaggctggctctggccgttacgcacggacggcaggttgtcccatagcgcgttgggttgacgcaggctctgcagacgcgccgacgtggtagggatctcgatatagagcaggtgggtatcgggcgtttcggcgagtcgctcgaccccggtcaggctgaaacccatcgcattgctcgggccttgccaggcgttgaccagaccaagccgatcgagcacatcctgggccatgctgttgcgtccatagaccgtggcatgacgaccgtcctggttgagcactgcgatacacagcggcggttgcggacggattgccaattgttcggccaacgcctcgagacgttcgttggctacctgcagataggcggcggcatgtgactccagatccagacgctcggcgagtcgcaaggtgaaggcgctggcgctgtgccagacaccttggtcggtgggatagatgtccaccacctcggttggcgcaatgctgcgcagcgcacggtcgacggtggggggcagagggtcgcagaggatcagttccggggccagttgctggagcagctccagattcggctcccaataggggcctatgtccaggaccggcggcttgaccggccaggttggcatacgccggttgtagtagccgacgtcggaaatcgccagtggggcgataccgagggtgagcagggtttccgccgcggcccagttgatcgccacgacgcgtcgcaggggttcggccctgatgcgcagcggcagtccggccgccagtgccaaccctcccatgccgagctggccgagcagttggcggcgactcaacggcatgcggacctccagtgattcgataacggcatgacaactcctgaaatgcgtcgggcccctcgctgaggggcccgtggtactgggtggtcggtcattcccttgaggtggttaccaggagtatttcacgctggccatgaggttgcgctcgaggccggggtagcagctggtcgccgaatcgcaggtggcggtgtagtcctcgttcagcaagttctgtgcgtacagccccagggtgacctgtggggttagtgcatagctggccgaggcatcgaacagggtgtagctgtcgatggcgaacgtgttggcgttgtcgccatacagcgagccgatgtaacgggccccggcgccgaggctgaagccgcgcaacgtgccttcggtgaagcggtagttgagccaggtcgaggccatgtgctcaggaacgttggctgggcggttaccctggttgccgtcgttgctgcgggtgatctccgccttggtgtaggtgtaggacgccagcaggtcccagtgttcgccaagcttggccttggcttcggcctcgatgccgcgcgagcgttgctcgccttcggcgacgctgagtccggtgggtgtaccgtttgcgttcagttggcgggtaagtatgtttgtcttggtcaggtcgtaggcggccaaggtcagtagcagatcgtcgtggggctggtatttcacgcctgcttcccattgttcggcttcgctagggtcgaaggtgccgccgccaggcgcctggccgctgttcggactgaacgactcggagtagctgacgtagggcgccaggccgaagctggtcaggtaggtgagcccgacacgaccggtgaaggcgtcgtccttttgatgactagagccagccgcgttgttgttgtcgttcaggtcgttatccacccggtcgtgacggccacccagcgtcagcagccagttgtcgtcgaaatggatttggtcctgtacgtatacgccgagttgctcgatggtctggtcgtagtcggcggcaaccacaccgttggtccgcgaggggcggggtaccgtctgcccataggtgggatcgagcaggttgagggtcggtcccatgttccgatagaacgcgacgtcggcgtcctgccagctgtaatcgatgcccgacaacagcgtatgacgtatcgagccggtcatgaagtcagcctgcaactggttgtcgatgttgaaggtgtccatgtgctggtcgcgacgatcagctacccgtggcaggttgtttccggtcggcggtaacggcagcaagttgttgaagatcaagtcaacttggccatagcgcaggttctggcggaattcgaaggtgtcgttgaaacgatgacggaattcgtagccgaggctgtactggtcctggtcgaaatggttgaagctgtggtcgcccagcagggtgtcggtggggtgaccgtttggcggggtgtagacaaacacgctgccgccgttgcgatcccgaaggaagtcggtgagaacggtcaggctggtgtcttcgctgggtgtccaggtgaaggacggtgcgatatacaggcgatcgtcttcgatttcgtggccatcgtcgtattcgatctgggtatcgctttcgcgggccagaccgaccacgcggtaaagaagttggttttgctcgtcgagcgcgccgccaacgtcgaactgcccctgtttgcggttatggctgccgccggtgagctgcacttcgttgacctggttggcggtcggtctcttgctcactcggttgacgataccgccggcatcaccttggccgaacagggtagaggcggggccgcgtacaacgtcaatgcgttccagcccatagggctcgctgcggaagaaggcgtagttgttgttctgctggcgcaggccattgaggtagtcgctggtggtcatgccgttgaagccgcgcaggaacaaccagtcgaaacctttgggatccaggccataggtttccaccttgaccccaggcacgtagcgcagcgcctctgtcacggtctgtgcgccctgggtttcgagctgggcacgggtaatcaccgagaccgactggggaatttcgagaatcggcgtgtcggtcttgctaccgctgttggatatcttcggcacgaagctgtcgtggccttcgatgaccccttcgaccaccgtctcgggcatgaccagaggggcagctgagctggtttcgtcgcccaccagggacacgcgattaccttcgatccgatagcggatgccggtgtcacggagcaacgtttccagtgcctgggtcggctccatctcgccgcgtacgccggatgtgcgcagattctgaacctgagcctggttgaagagaatctgcaggtcggtctgcgcgccaaggttcgtcagcgcagaggccaatggctgggcgggaacatcgatgctgaccggcgcggccatcgcgccggtggcgctcaatgtcagcccaatcgcggcggcacggatgatcgccgccagtggctttttgcgatgcgaagcgctgaaagaccgtttcactgtgtagctccttagatcgaagtgttgttaagaactatttagatttatataacgcgtcagccacaaaaaaccggaaaaattaatttgtctcagtgcacagcggcatcgcgctgctgcgtgtggcgtgggttttcgcggatctctgtgatgcgccctgcgctcatccgcaacaggcggtcggccacatcgaagtagcgatcgtcgtgggatatcacgatcagcgtgcggccctgggcgcgcagctccggcagcagctcggtgtagaaaatgcgccggaattccggatcctggtcagcagcccattcatcgaacaccagcaccgggcgcttttccagccaggcctgtaccagggccaggcgcttgcgctggccggtggagagatcgatggtggagtagttatggccgtccagcgtgaccttgtgggcgatctccaggcgctccaggtagcgactggcttcgacgggaatgtcctcgctttccttgagcaggtcttcgaagaggaaatagtcggcgaagatggtggtgaacagctggcgatagtcatcgcgattgctgtccgtcactggctcgccgttgacccgtagctcgccgccctgaggcacgtaaaggccgagcaacagcttgatcatcgtggtcttgccgcagccgttttcgccggcgatgaaaagaatttcgccggggcgcacggtcaggtccagcgggcccacaccaaagccctgggtgccgtcttcggtggggtagtggtagtgcaatccgcggagttctatcccgttcatgggcattgcggggcggccgtcgtcacgtagcagcagattgggttccggggacgagaaacgcaccgaaagctcggcgatgcgacggaaagcgacttgcgcgcggctgacgatgggcagttggccgatcaggtgctccagcgggcctttcatgtacagcagcacgaggatgaaaccgctcagggtggccttgtccgtgctcggccagatcgtctggtaggccagggccacaccgatgacgatgaagaacagcgtcgaaccgaagcctttggcaaccacgaattgattgatcgacctgacctggatgtcgcagatgcgatccgcggtgccctgcaaacgctcgctgtagtgctggaaacggcgcggacggctgatccgcagctccttggcgccttcggccatggcccggtagtgcttctgcagttcatcttcttcgtcgcgcgcctcgaagaagccacgaatgcccttgctgcgagcgacgtactgcaccgcactaccgatcacgatggccagtgcagtggcgagaaacatcggcagcgacagcgaggccagatacccgaggcagccgatgctgacggtgaaggagacggccagcggagcgaacgcaaaggcgaagtcgctgatggtgtcgatgtcgtgggtcaacaccggaatcaggcggtggctgcgatagcgctcgatctgatcgatgggcgcggagatgatcttgctgccgagatccttgcgcaaccgggcgatgacgtgttgtccgacatagttggtgccgatgtcggacacgaccgagcccaacagggccatcaggcacaggccggcgaagcccagcagcaggccgctctgcagaccggcatccgaatgcaggctgtagttgatggtggccagtagggcagtgatgctggcgccgccgagcatgccgagcagcgtggcgccaaacagttgcggtccgaacggacgaaggagccggaagagttcgcggagcgtgctgttcgtgggtgtctgcatcgttgagtcctaacaggagatcgtcaccagccaggtggcggtaaatccgaatcgttcctgttaagacggatgaagcgataaaaaactgaataaaaaagattgggtttcgttcgtcaggctggcgccggtaggtgagggcggctcagagcgtcttgtttcgactcaccagaaccgtgctgtcgtcgcctcgccgttgaagttcgatcggcaggaccacgggtagcgagtcgatcagcgcgcgcaggtcgttggtctggtaaacccctccgatacgcatggcggccgcgccttcatcgccgaggcgaacaggcgtgtccaggtagcgattgatcaggggcaaggcgctgctcaaaggtagatcgtccagcacgagcttgccttcgatccaggcgatggccccggtcgaggccacctgatccacctcgattcgacggctggcctggctgtagcgcgcttgcatgccgggcatcagctgagcactgttgccgctcacgcctttcggtgggctcaccgtcaccgagccgtccagcagcgtgacgagcagttgctgtggactggtccagacgttgaaacgggtaccggtcacgcgcacctggccgttatcggtatgcacggtgaatggttgcgatcggtcgtggcggacttcgaagaaggcttcgccatcatcattcagccaggcaccgcggcggtcgcggtaattggcgaaaaatagccgggtatggctgttgagctgaacctgcgagtcatcggcgagggtgacttttcgtggtgcgagttcggctgtgtaatagccgattcgcgatggcaggaccccggtcgaccagcctgccgcccacagcgtgccgaccatgagcaggagcgccgcggcggctccggcaatgcgcccatgagagcgccgtcggcgtgggcgggtaggcgctgcggttgaacgcggaagtacagacgggctgggctgcttcaggccttcggccaactgccagatgtccagcatcgcagcgtattcggcacggtggcgcgggtcttctgcgagccagcgatcgaagtcccgacgctcttcggtggagcaatccttgtcgtgcagacgcgtgcaccagagcgcggcctcggcgctcaggcgatcatcgtcagaagggggcgggttgccgatcattcgagagaatccggaagcgttaacacgctttcatttcagaaaaatgcgagtgattataagtacggggtgacatggactgccagcatgcatccgtaagatgcgtcacgtccgaaacctgcatggggcggttcgggcgcagagcgcgaagggaagctgctgtgatccgccattatcaggaactcgtccattacctcagtcgcctgctcggcgatcgtcaggctgccacggacttggcgcatgacgcttttgtgcgcctgctcgatcgtaaggcagggagtgacatcgagcagcctcgtgccttcctcttcaagaccgcgaccaacctcagcatcgacttgcatcgccgcacccgggtgagacgcaacgaaccgctcgacagcctcgaccgcgaagattacctggatgagcgcgaccccgaggaaagcgctattcaggctcagcaattgaatctgttgcgacgggcgctggaggagctgccggccccttgccgggacgcctttctgttgcgcaaggtggaaggctgctctcacaccgaaattgccgaacgcctttccatgtcccgcgacatggtggagaagcacatcgtcaacgcgatgaagcactgccgtgcccgtatgctcacctggacccgctgacaactaccgctcgttcggaccttcactcgtgcccgtaatgagaatgattctaaatttattggtcgctgcctcgtcttctcttcaaagccgctttcaccccgtcgacatcacggcggaggcgcgcttccggtggtcggccgcgtacgcgtcggcccgtggtaaacggctagaggacacaggcaccatgactcaattgattgctccaacgtacgacgtgctgggcatcggcttcggcccctccaacctggcgctggccattgccctgcaggagcagagccagcgccagaaccgcgattgccacatgctgttcctcgacaagcagcaggattatcgctggcatggcaataccctagtgacccaaagcgaattgcagatctccttcctcaaggatctggtgaccctgcgcaatcccaccagcccctacagtttcgtcaactacctgcacgagcagggccggctgattgatttcatcaacctgggtactttttatccgtgccgcctggagtacaacgactatctgcgctgggtagggcgccagttcgccgatcagtgcgcctatggcgagacggtgacgcgggtcgagccggtatccggcgtccagggcgtcgatcggctcaaggtgatctccaccgatgccaagggccatgagcattttcgtctggcgcgctccatcgtgctcagcaccggcggcacgccgcgtatcccggaaacctttgctcatttgcgcggcgacggtcgcattttccaccactctcgttatctggagtgcatggcgcaacagcgctgcactcgccacgagccgatgcgcatcgcggtggtgggtggcggtcagagtgccgccgaagcgttcatcgatctgaacgacagcttcccttccgtgcaggtggacatgatcctgcgcgccgcggtcctgaagccagctgatgacagccccttcgtcaatgagatattcgcgccgaactacaccgatctggtgttcaacgagccggaaagcgagcgcgagaagctgattcaggagtatcacaacaccaattattcggtggtcgatctggatctgatcgaacgcatctacggcattttctatcgtcagaaagtcgccaatcatgcacgtcacggcttcctctgccgccgctcggtggaagctgctcgcgccgatgcggacggcgtcgaactgaccctgtgcgacagcgccaccggcatggtggagaaccgtcgctacgacgcggtgattctcgctaccggttacgagcgcacctcgcatcgcgagttgctggcgccgctgcaggagtatctaggcgacttcagcgtcgggcgcgattaccggatgcgcgccgacgcccgtctgcgggctggggtctatctgcaagggttcagccaggacagccacggcctcagcgataccctgttgtcggtattgccgatgcgtgccgaagaaatcgccgcttcgctgttcgacagcctgccggcggccgcaacggtgccgtgtgcccgcactgcggaaagtgcctgaagttcttcgtcgcgtccgccatcgagtcgttcggtgatgaataccatcgaacgactaattttttcaggtgcttgttcgtcttgaatgttttcgaggtatcgcatgcccagtttttccattcccttgcctgatggccggcaattgctcgtcgatggcggcgaccacgcgctcagcctgctggtcgacgatcaaacgctaggccgcgccgagcgtcagggcgagtcctggtggctatccgctgtcgacttgccgccggcggtctgggcgctggcctaccaggcgttcgccagtgacccactgtgccaacggctgtcgctgagattggatgagtggccggcggaactggtgaacagcggcgtgctcaaccgggacccgaccggcgcctggcaggtggagcgggcgacgttctggcaattaccggcaccctggcgccgtggtccggctagcgaaggctatccgcaacgcttgcgtattaccgatggcaagcgccatccgctgcgcccgccaaagccgagcggtgagctgtatcggcgtttcgatgcgcgcctgggcagctggatttcgtttcgtgctctggacatcgacaccgacctggagcgcttcaatcgctggcagaaccagccacgcgtagcggcgttctggcaggaagagggtagtctcgagcagcatcgtcagtacctggataagcttgcggccgattcccatacgctaccgctcatcggctgcttcgatggcgagccgttcggctacttcgaggcctactgggccaaggaagatcgcatcgcgccgttctactcggtcgatgactacgaccggggcatccacatgctggtgggggaggacgcgcatcgcggcccgcacaaggtggaaagctggctgtcgtcgctggttcattacctgttgctggacgacccgcgtacccagcgcatcgttgccgagccgcgcgccgacaacgcccggatgatcgatcacatgcagcgcctgggtttctggcaggaaaaggagttcgattttccgcataagcgcgccgcgctgatggtgcagagtcgcgagcgcttcttcgagcgatgccggctgtgctgatccgcaccccatgcgatgaacgggagcggcgatgatcgccgccctcgcgccgctgtatgtcggcgagttctccagctaccgtcacgtcctgacgacccgggacgacgcgggtccgtcgatacccgcttcccagttgctgcaaaccgctcggctcgatgcgatcttccagcgtttcgacccgttgcataccgggcaggatcgtcgtgcgctggcctcgcagtggtccaaatactatctggtacgactgatcccgccggtggtggctgccgccctggtgctcggttggcgtctgccgttggctttcgaagacgtcgaggtggtgctggacgaacaaggcttaccgcaggcgttcaagctgccccatgaaggcggccctttcggtacgccgccgagcgatccgttccagcgtttcggcgagctgatcgacgccaacctgcagcccttcatccagggactggcgtcggaggtgcggctgtcgcccaaggtgctgtggagcagcgcgggcaattacctggagtggttcctcggtgagatgaccaaggcgctaccggcggtggtgttgacccatggtcacgaattgctggcgagcgaacgccgccccgatgggcgccgcaatccgctgtttcggcctgttcgttacgtggaggtcagtcccgcgctgcgtccggatggtctatggcgtcagcgccgggtttgctgcattcgctaccgactggaacatttcgagcactgcgacaactgtccgctactggaccagccgccagcctatgtgagcgatctgtagtcgcccggcatcgacccgcagggcagggcgcagtctggtgacgcaccgctactcagtgcacgtagcagatcggtgagccgtccgctggattggccagcacgcccatggaaatcccgtagatgcgttccagggtttcgctgtgcatgagctcggccggattgccttgggccagcaatcggccgctgtgcagtgccagcaggtcgtcgcagtagcgcgccgccatgttgatatcgtgcagcaccaccagcacgccgagaccgagctggcggctgaggtcctggacgcgggacaggacttccacctggtgggcgatatccagcgccgaggtgggctcgtccagcagcagataacgggtgttctgcgccagcaacatggccagccagacacgctggcgttcgccaccggacaactgatccaccaggcgctcagagaagacgctggtgtcggtcagttcgagcgcgcgttgtacctgggcccggtcttcgctggtgaaacgccctagtgcgccatgccagggatagcggccgaagcccaccaattcccgaacggtcagcccatcggtctgtggcaactgctgcggcaggtaagcgacctgctgggcaaaatcgcgctggctccaatccgatagcgccttgccatcgaggcggatatgcccggcgctgggcagttgctgccgggccagcagcttgatcagcgtggatttgccggagccgttgtggccgatcagaccgaccatgcgcccggaggggatgcgcaggctcagagggtgcaagagggtgcgctcaggaatactgaagctgacgctttccagttcgaacatgggatccatccgccggatattttcgggaagccggttagcctaattcaaatgctaatggttatcaattttgcgagaggtaaggctattgcgactctccgcgctgcgcatggcctcttttagggcgcctatccacttggctgcgcagaccggtctttccggcggagctcagggtccctttcgctccatcttcttgagggcctgccggcaatggatcagcgtatcgcgcaccatgaagttcaccagcgtcggcgagaccccgagttcagcggcgattgcgctctgcgttttcccttgcaatcgatacatctcaaaggcgtagcgggtgcgttccggtagctgtgcgagtgcatcggagagtgcctcgagcgtctgccggctttcgtgaaggccctccggagatgctcccgaagcgcagacgtagagaccttcttcctcactgccggagtagcgcttttccaaggcctgacggcgatagcggtcaatggccaggttgcgcaccacacgcagcagataactgatctgcgagtgagggccgggaatttcggctgcaccgcgcagcttcaaatacgcatcgtgcaccacgtcttcggcgtggctgcgacacccgagaatgcgcgccgccgcgttgatgaaggtctgcctgttcgtgacgaacatgtcattcagggccgggtgctgctctgctgaaattgttttaggcatgtgaagtttcctgtacgacgcgaaggcggacgtccatatggcttgggctgtcctggggcagccgagcgtgttacccgctcagtctggcccacctgtactggctcgaaggcgagtcaatctagtccaaatgataatacttatcaattcgttcgttgtgaccgttgctgctttctgctgaatggcggcgttcgtcggacccacgatcatgctgcccgttccactgtgttgagaataaatctcatacgcgaaggctaactattccgcgcgctccttcgtcttcatcggaaagcggccaacaggtgctcagccaccgtaccgcccgatcaaccgccccgcgaggggcgaaggagagtaaagatggcattcgatcgcgaagacgcgctgttcaaggtcctggtcaaccacgaagagcagtattccctgtggccggactacaaggcggttccgaccggctggcgggagaccggccagcgcggcagcaaggcggagtgcctagcctatgtcgagcgggagtggaccgacatgcgaccgctgagtctgcgtcaggcgatggacgaacaagcggcggggcagtaaacgatggtcgctcgcctgcgtttgttctgcctgccgtattccggggccagtgcgatggtctatgcacgttggcgccgttccttgccggagtggatcgaggtggttccgctggagctacccggccgtggccggcgcttcaacgagccgctgcagaccgacctgctcggcctggccgaccaactcgctggcgagctggaagagcgcctcgacctaccctatgcgctgtttggccatagcctcggcggcctgcttgtcttcgagctggctcacgcgttccgccaacgcggccttccggcgccgcgggcgttgttcgtctcggcggcgccagcgccgtcgcgccgcgaaaaccatctcgagctggcggtggagcagagcgatgcccagttgctgcagcgcctgcgccgtctgggtggcacccccgaggcggtgttcgctgacgaggaaatgttgcgtctgaccctgccggtgctgcgcgccgacttcctgctatgcggccgttaccgctattaccgtcgtgcgctgctcgcttgtccggtccatgtgttcggcggcaaagccgatcgggtctcggtggacgcgctggccgcctggcaggacgaaaccgccgaaggcttctcgctggagatgctcgagggcgatcacttcttcatcaatgcctgcgaggcgcgcctgctcgagctgatgctcggcaagctgcgccagcgcgggcgcgatctccaggccatctgggcctgaacggagagttcgatggcactcttttccattcagcccctagccgaagcacgcgacggacttccgctgttggtgcaggccgagggcgaggtcgaccttctggtggcccaggccgaactgcgtgggctgatcgacgagcacctcgaacgctgcggtggcgtgctgctacgcggtttccgcgttggcgaggcggagcgcttccgcaccttcgccgccggcttcggcgatccgctgctcaattacgagttcggctcgacgccacgcagcagcgtcaccgccggcgtctacacctccaccgagtacccgccgcaccagcacattccgctgcacaacgagcaggcctatacccgcgaatggccgatgcgcatctggttctactgcgtgcaggccgcgcagagcggtggcgagacgcccatcgccgacagccgggtgatctaccggcaggttggcgagacgatccgccaacgtttcgccgagcgcgggctgatgtacgtgcgcaacttcggcaacggcctggatgtggcctgggagcaggtgttcaacagcgacgaccgcgccgtggtcgaggcctattgccgcgcccaccgcatcgaatgcgagtggaaggacgacggcgagctgcgtatccgccaacgctgccaggcggtggcccgccatccgcgcaccggcgagtgggtgtggttcaaccaggcgcacctgttccacgtctccaacctgcctgaggaggtgcgcgagagcctgctggaaatcgtcgacgaggaggacctgccgcgcaacgtctactacggcgacggcagccccatcgaggaatccctgctcgacgatattcgcggcgtgctcgccgaggccacggtgagcttcccctggcacagcggcgacgtgctgatgctcgacaacatgctcgccgcccatgcccgtgcgccattcagcggtccgcgcaaggtcatcgtcgccatggcgcaaggccacgggcttgaccatcccaaggcctgacggccgcgattttccaactcctcggcgggtgccagacacccgccgcgattcaaggtgatgccatgaacgatcgttacgacgctgccgccaacctggtcgaggtgctgtgccagcgcgccgccgaaacgccacacgatatcgccctgcgcttcattgccgaaggggtcgatgaaccgctgacttatcgcgatctggacgagcgcgcccgggacctggccgtctggctattgcagcatggccaggccggcgaccgcgccgtgttgctgatgcacagcagcccggaatacgtcatcgccttcttcgcctgcctctacgccggcgtcatcgcggtgccggcctatccgccggaatcggtgcgtccgcagcacctggcacgcctgcgggctatcctcgacgacgccgagcccagcctggtgctcaccgactccagtcttctcgacgctctgcgtccggcttgccagcgtagcggcggcacctcgccgcagttgcttgccgtcgaccgaacgcccgccgacctggcgctgggctggcggatgccgaggctgagcgatgcgcacatcgcctttctgcaatacacctcgggttccacgtcgacgcccaagggcgtgcaggtcagccatggcaacctgctggccaacgagcggctgatccgccatgggctgggcatgggggccgacgacgtgatggtcagctggctgccgctgttccacgacatgggcctgatcggggggctgctgcagccaatctacagcggcattccctgcgtactgatgtcgccgcgctacttcctcgagcgtccgcgccgctggctggagacgatctcacgctacggcggcacggtgagcggcggcccggacttcgcctaccggctgtgctgcgagcgcatccgagagtcggcgatggacggcctcgacctgcgcagctggcggctggcgttctccggctccgaaccgatccgccccgataccctggagcgtttcgccagcaccttcgctccggtggggttcgatccgaacgcgctctacgcgtcctacggcctcgccgaagcgaccctgttcgtcgccggcggccagcgcggcaagggcatcggcctgatggccgtggattcgacagcgctggccgccaatcaaggccgtcccggcgatggcgtcaccctggtcagctgcggccgtccgcaaccggatcatgacgtgcaactggtcgacccggtcagcggcgagacggtggcgccgggtggcgtcggcgaaatctggagcagcggtccgagcgtggcgctgggctactggcgcaaccccgaggccagcgcgcaggtgttcatcgagcgcgacggccgcacctggttgcgtaccggcgacctgggctttctatacaacgacgagctgtacgtcaccggccggctgaaggacatgattatcgtccgcggccagaacctttacccgcaggatatcgagcgctgcgtggaagaggaggtggacgtggtgcgcaaggggcgcgtgtcggcgttcgccgtcgaacacaatggccgtgaaggcatcggcatcgccgccgagatcggtcgcagcgtgcgcaagctggtgcccgccgccacgctgatcaaggcgatcagcgccgccttggcagagacctttcaagaggcgccgttggtggtggcgctgctggagccgggcgcattgccgaagacctccagcggcaaattacagcgctctgcctgccgtcacaagctggccgacggtacccttgatgcctatgccgtccagcgcgccggggagccgtcgatcgatcaccagacggctaccaccatggcgccgctgagcgaggcagagcaggccatggcggcgctctggtgcgaggtgctgcaggtgtcgcaggtcgcccgcgacgaccacttctttgccctcggcggcgattcgatccgcgccacccagctgatggctcgtctgcgcgaacgccaaggccgtgcagtggacatgcgcctgctgttcgaagcgcccgaactgggcgcgttcgtcgcggctctggccaaccacggcgcatccgccgcatccgctgaggcaccgcgcaacgtgccgcgcctggagcgcacggacttgttgcccctgtcaccggcccagcaccgtctgtggttcctctggaagctggagccacacagcccgctctatcacatcgccggcagcctgaccctgcgcggcgagctggatcgctccgcgttgcggcaggcattcgccgacctgctggtgcgtcacgaaaccctgcgcagccgctttatcgaaggcgccgatggtgaggtccagctgcgactcgccgcgcccgggccggtcccgttcagcgagatcgatctgagcggtcaaccggccgccgccgaggccgatgccgcgcgtttcgccgccgagccgttcgatctggcctgcggcccgctgctgcgcctgcgtttgcagcgcctgggcgaaggccgtcaggcattgctgctcgttgtgcaccatatcgtcgccgacggggcctcgctgaatctgctgctggaggagttcgccgcttgctatgcggcgcgcctgcaagaccgctccgccacgctgccggcgcttgaggtccagtacctcgacatcgctgccgcccagcaacaggctttggacagcggggagggcgcacgtctgctggactggtggcacacacgcctgggtgatgaacatccgccgttggagctgccctatgcattggccgatgcccgcaacgcgggacgccgcgccggtctggtcgagcagcggctcgatgaccgcctcgccaccgagttgcgcggcctcgcccagcgtcacggtgtgaccctggccatgctcctgctggccggcttcaacctgctgctgcaacgcttcaccggccgacaggatctgcgcgtcggcctcacccaggctgggcgtgagcagctcgtcagcgagcgcctggtgggcttcttcgtcaacctgctggtgctgcgcagtgacttgtcggccaacccgacgttggccgggctgctgcgtcaggtacgtgacggcttgctcgaggcccaggcgcaccaaggcctgccgttcgagcaactggtcgaagccttgcaacccgagcgtggtcatggccgacatccgttgtgccaggtggcctatgactaccaggtgcgcatcgatccgagcctgccgggcctggccgtggaaagcctgcggcagatcgacctggaaacccccttcgatctggtcctgcgcgtgcgtgagagccgcgatggcgtcgagctgagcttctgttacgccgccgagcgctatgccggcgagggtatggcgcgcatggtcgagcagttcctcgcgctgctgcgcgccttgccaacccagccagccgaggcgccgctggaggccagcacctggctcgacgccgcgctctggcgtgacgaagcgacagctcagagcggcgttttcgaaccgctggccgcgcgcatcgccgcccaggccgccgagcgtccccaggccgtggcggtggtggatgacgagcgtgagctgagcttcgccgagctggacgcgcgcgccaaccgcctggcccagaagctggtagcggccggtgtcggcccggaagcgcgcgtcggcgtggccttgccgcgcggggtcgatatcccgttggcactgttggccgtgatgaaggcgggcggcgcctatgtgccgctggacctggactacccgcacgagcgcctgagctggctgatgcaggacgccgggatcggctggctgatcagccttggcgccctggccgagcgcctgcccgcaatggataacgtgcaacgcctggatctcgatcatctcgattgggccgcctggccagccgagtgcccgccgtcgcgggtgcatccgggcaacctggcctacctgatctacacctccggctccaccggccagcccaagggcgtggcggtggcccatggcgaaatcgctgcgcactgccgcgccatcggtcagcgctatgccatgagcccggccgaccgcgagctgatcttcatgtcgttcgccttcgacggcgctcacgagcgctggctcaccgcgttgtcccatggcgccagcctgctggtgcgcggcgaggcgctgtggacgccggaagaaaccctcgagcgcctcaagcagcatcgggtgacggtcacggctttgccaccggcctacctgcagcaactggccgagcaggcggcgcgcctcggccatgcgccgagcatgcgcatctactgcttcggcggcgatgcagtacccgaagcggccttcgaactggcacgccgcagcctcaaggccgagcacctgatcaatggctacggaccgaccgagacggtggtcacgccgctgttgtggaaagccgacgccaccgctcgttgcggcgcagcctatgcacccatcggcgaggcggtcggcgcccgtgcgctgtacgtgctcgacgagcacatgcaaccgctgccgcgcggcgtggccggcgagctgtatatcggcggcgagctgttggcgcgcggttaccaccagcgtcccgggatgaccgccgaacgcttcgtcgccgacccgttcggcgccgccggtggccgtctctatcgcaccggggaccgcgtgcgctggcgcgacgacgggctgatggactacctcggccgggtcgaccagcaggtgaagatccgtggttttcgcatcgaaccgggcgaaatcgaagcgcgtctgcgcgcgctggacggcgtgcgcgaggcggcggtagtttgccgcgaaggcgcgggcggccgccggctggtggcctatgtggcgccggcacaatcggccgatgcgctcaaggcggcgctgcgtgagcaattgccggagtacatggtgccggcgcagatcgttggtctggagcgcttgccgctgaacgccaacggcaagatcgaccgcaaggcgttgcccgaagtcgcggaggctggaagcgaccgctatgtcgctccgcgcgacgggctggaacgccagctcgccggattgtgggccggtttgttggaagtatcgcgggtcagccgcgaggatgatttcttcgaactcggcggccattcgctgttggctacccggctggtgtcgcggattcgccgtgaccacggcctggattgcccgctgcaggtgatcttcgaggcatcacggctggatgcctttgcgacccgtgtcgctgctctcgaaggcagcgccggtcggccgccgctgcgtgcgctgccgcgcgacggcgccttgccgttgtcgccggcgcaaagccgcctgtggttcttctggcagatggagccgcagagcgcggcctacaacgtgcctggcgcgctgcgcctgcgtggcgcgctggacgaagctgcgttgcgccagaccttcgccgccctcatggaacgccacgaaaccctgcgcaccaccttcgacgagcgcgacggcgagccgtgtcagatcatccacgctcaggtggagctgccgctggtgcgcctggacctgtcgactcaaaaagacgcagaagttcaggcgcgccgtctggccgaggaggaggcggcacgcccgttcgatctgcgtgacggaccgctgctgcgcctgacgttgctgcgtctggccaatgatgaccatgtgctgctgttgaccttgcaccacatcgtctccgacggctggtcgattcgcgtattgatggacgaattcgccgcgctgtaccacgccgcgctcgatggcgtccaagcgcagcttgcggcgctgccggtgcagtacgccgactatgcgcagtggcagcgcgccctgctcgccggtggcgaaggcgagcggcagttggcttggtgggtggaacgactcggccgcgacaacccggtgctcgccctggccaccgatcgcccgcgtccggcccagcaaagttaccggggcggcagcctcggtttcgagctggatgccgagctcagcgaacgcctcaagaccctggcgcggagccaggacgtcaccctgttcatgcttctgctgggggcctatggcgtgctgctgcgcagctggagcggccaggacgacctgcgcgtcgccgtgccggtcgccaatcgccagcaactggaaaccgaagggctgatcggcttcttcgtcaacagcctggtctacccctgccggatcgacccgcaggcatccttcgccgacctgctggccagcctcaaacccctggccctcggtgcccaggcgcaccaggacctgccgttcgaacaactggtcgaggccctgcaacccgagcgcagcctggcctggaacccgctggcgcaggtcaagttcaacttcggcttcgacgtcagcaccttgccgaccgccggcgcgctgcgcctggagctgttcagcgaggagcagtacggcgcgcgcttcgatctggctctggacatggccgaagccggtgatgacggccgtctgcgcggcagcttcgtatttgcccgcgatctgttcgatgccagtactgttgcgcgcatcgccgcagtcttcgcctggcaactcgagcaactctgtgcccggccgttcgagccgctggcacgactggtcccggcgccggccgaggcacgttcgcagctggcaggagagcgccgtccgtggccagccgccaacgtcctgcacctgtttgctcgtcaccgcgatacgcgtctggacgagacggcggtcgaggcctgggatggtcgctaccgttatgccgacctggatgccgctgtcaaccgcctggctcacgcactgcgggccgagggtcttgggcctggcgagcgggtcgcgctctgtcaggcacgtggcgcgcgctgggtgatgatgctgttgggcgtactcaagagcggcgccgcctacgtgccgctcgacccggcgctgccggccgcgcgcctgcgggaactgctcgccgagagcggcgcccggcgggtattggtggacgatgccgagatcgccgcgattttcggcgatgccgcgctgcgggtgggggccgagggtccgcaggacttcccatcccatgcgccgtccgtggccatcgacccggccagtccggcctacgtgatcttcacctccggctccagcggccagcccaagggcgtggtgatcagccacggcgcgctggccaactacgtgcagggtgtgctgacgcgcctggacggccagcccggcgaaggctgggcgatggtgtcgtcggtcgcggccgatctcggccacaccagcctgttcggcgcgctgtgcagtggcgggcgcctgtgcctggcgggcgccgaagaggtggccgatgccgagcgtttcgccgccttcatgcaaggtcgcgccgtggacgtgctgaaaattgtcccaagccatctcgccggcctgctggccgccgcgccgcaaccggccagcgtactgccgcgtcgcctgctggtcgtcggtggcgaggccaccagcgcgccgctgctggcccgtctgcgcgagctggcgccggcgctgcgggtggtcaaccattatggtccgagcgaaaccacggtcggcgtgctgacccgcgaatggcgcaccggcgatgcgctgccggatggcagcctggccatcggccggccgctgccgaatgtccacgtgcgggtcgtcgacgcccagctcgcgagcctgccgctgggcgtaccgggcgaattgctgattgccggtgacgggctggccgagggttatctcggccagccggagctgacggccgagcgcttcgtcgagctggacggcgaacgccactaccgcagcggtgaccgcgtccggctgcgcgccgacggcgaaatcgaatttcttggccgtctcgacgagcaggtgaagatccgcggttaccgggtcgagccgggcgagctggcgcaggtgctcaagcgcctgccgggcgtgcgcgatgcgcaggtggtggccgaacgcgagggcgacggcccgatgcgcctgctggcctggtgtgtagccgatggtgacgccgaaacgctgcgccaggcgctggccgccgaggtgccggaatacctgctgccgacgcacctgttgctgctgccggcgctgccgctgaccgccaacggcaaggtcgaccgccaggcgctgccgcgtccgggtgctgttgctatccctcatgacgggcagccgctgagcgagctggaaaaccaactggcggcaatctggcaagccgtgctcaaggtcgaacgggtgggcgccgaggacaacttcttcgaactgggtggcgactccatcctcagcctgcagatcattgcgcgcattcgcaaactgggcttcaagctcagccccaagcagctgttcgagcggcagaccgtgcgccagctggcgcaatggctggaggtccgtgccgtgccgacggccgttgcgacaccggccgtcgcaccagtcagcagcgaagcgccgctggcaccggtgcaggcacgcttcttcgagcgggtgccgaccgcgctgcgcaatcactggaaccaggcggtgctgctggagccccttgaatcgctcgatctcgatgcgctcgaccgcgcccttcacgcgttgctaggacgtcatccggcactgcgtttgcggcaggacggtgacagcccgcgcctgcgcatcgccgagctcggcgcgctcgacttgaccttgctctggctccgtcgcgcccccgaccagcagacgctcgaacgcctgtgcgacgaggcccagcgtagcctcgacctgcgtcacggcccgctgctgcgcgccatgcacgtcagcctggagcagggcggcgaacgcctgctgttggcgattcaccacctggccgtggatggcgtgtcctggcgcgtgctgctggacgacctgcacagcgcctatcgagccgcccgtgccggccagctcatcgcattgccggccgaaggcgacagccatgccgcttgggccgcccgccagcaggcattggcgacaagcccggcactggccgccgagctgccgtattggcaggcgcaattggctgaggcgccgcgcattccgcaagccgtggccgatgcaccggctacctggcgcgaggcgcagcagcgccgcgtcagcctggacgccgccacgaccgccgagctgctcggcccggctctggcgaatcagcgcctgcgcatcaacgacctgctactgaccgctgtgggccgcgcgctgtgcgaatggaccggcgccgacgaggcgctgctggaagtggaaggccatggccgcgatgcctttgacgacagcgagccgctggacctctcggctgcagtcggctggttcacctgcctctaccccttgcgcctgcgcccgagcggcgagcccggtgcggcgctgcgtgcggtgaaggaagcgctacgtgtggtaccgcgcgccggtatcggctatggcgtgctgcgctacctgagtgaccatgcgcaggtgctgaaagccgcgggccagcctcgtgtcaccttcaactacctgggccagttcgaccagcagttcggcaccgaggcggcattgcgtccggccagcgagtccgccggtcgcagccagccggacaatgcgcctctgggcaactggctggtgatcaacggccgcgtactcggcggtcgtctggaactggaactgacctacagccgcgccatgttcgctggcgaggccatcgacgcgctggttcagggcctggagcagtcgctgctcgggctgttggcccacgtgaaggaggccgagccgcgtctttcaccaagcgacgtgccgttggcagggctggaccaggccgcgctggatggcctcgcgctgccggtagctaatctggaggacctttatccgctgtcgccgatgcagcaagggctgctgttccatgccctcgatgtgccgggctcaggcctttacatcaaccagctgcgggtcgatttggacgggctcgatgcgtcgcgcttcatcggcgcctggcagcgggtggtcgcgcgtcacgccgcgctgcgcagcggctttctgctgaccgagggcggtgcacccttgcagttcgttctgcgccaggcagaactcccggtacgtgaacatgactggcgcgagcgtggcttcgatccggcggcggcagatgccctggccgatgccgaacgtgccgaaggcttcgacctggcttcgccgccgctgcagcgtgtggccctggtgcgcctgggtgagcatcgctaccacctgatctggacttgccaccacctgatcgccgacggttggagcagcgcgcggcagatcggtgaagtgctcgcgctctaccggggcgagtcgctgccggcgcagatcggccagtaccgcgactacatcgcctggctgcagacccaggatgccggtgccggcgagcgcttctggcgcgagcgtctggctggcttcgaggagccgaccctgttggccggcgcgctgagtcaggtagccgaagagcccgcgcgggaagtgcacagccggctgggtgccgacgcgacccgtcgcctgcaacagttcgcccaggcccagcgagtgacgctcaatacgttgctgcagggcgcctggctattgcttctgcagcgctacaccgggcaggcgcgaccctgtttcggcgccaccgtcgccggccgcccggccggattgccgacggcggaaagcctgctcgggctgttcatcaacaccttgcccatcgtccatccggtcgagccggagcagggtgttggcgactggctgcgcgacctgcaagcgctgaacctggatgcacgcgagttcgaacacagcccgctgcacgacattcagcgctgggccggcaagccggggcaggcgctgttcgacagcatcctggtgttcgagaacttcccgatggatgccgtcctggcgggcggcggcgatgaccttaaggtgctgaaccagaaaccgctggaaagcacccacttcgccctagccctggtggccagcgccggcgaatgcctggacgtgcgctacgcctaccgggcggaccggctggcggcgagccaagtggagcgcttgcgcgaccatttcgagcgcctgctgctggccctggtcgacgacgctggccgccgtctggccgagttgccgatgctcgccgacgtcgagcgcgagcagctgttgcaaggctggaacgccaccgaggcagcattccccgacgttgttcagctccaacaattgttggaacagcaagccgcgagcaaccctggcgctctggcgctgcaattcggcgcgcagcgtctgagctacggcgagctgcacagccgcgccaatcgcctggcacgttggctgcgcaggcagggcgtcggaccggatgtactggtgggcgtggccgccgaacgcagcgtcgagctggtggtggcgctcttggccatcctcaaggccggtggcgcttatgtgccgatggacccggattacccgcgcgaacggctggaacacatgctggccgacagcggcgtgacgctgctgctgacccaggcgcatctgcgtgaagcgttgccggtctcgaacgcccggctgttctgcctggacagtgattggtcagaagttgaggggctggacgacagcgacctgccgaccctgggcacgccgcagaacctggcctacctgatctacacctcgggctcgaccggcaaacccaaaggcgccggcaacagccatcaggcgctgatcaaccgcctgtattggatgcagaagcaatacggcctgacgccggctgatcgcgtgctgcaaaagaccccgttcagcttcgatgtctcggtgtgggaattcttctggccgctgctgaccggcgcggcactggtggtggcggaacccggggcgcatcgcgatcccttggctctgcgccaggtgatcaatgcgggcgaagtcagcgtgctgcacttcgtgccgtcgatgctgcaagccttcgttgcctccggcgagctggaacagtgtttatcgctgaagcaagtgatgtgcagcggcgaggcgttgccctacgaactgcaacagcaattccgccagcggcacgcggccaagctgcacaacctctacggtccaaccgaagcggcaatcgacgtcagccactggacttgcgaggaggaaaacgagcggcatgtcgtgcccatcggtcggcccatcgacaacctgaagctgtacatcctcgacgcctggctggagccggtgccgcagggtgtggccggcgagctgtatatcggcggcgtcggcttggcacggggttatcacgcgcggccagggctgaccgccgagcgcttcgttgccgatccgttcggtgaaggcgggcgcctctatcgcaccggagacctggcgcgttggcgcgaagatggcgccatcgaatacgtcgggcggatcgaccatcaggtgaagatccgcggcctgcgcatcgaactgggcgagatcgaagcccgcttgcaggctcatccgcaggtggaagaagcggtggtggtggcccgcgacacgccgcagggcaagcagctggtgggctacgccgtggctggttgcgacggcgacctgttgcgtcaggccctggccgagcaattgccggactacatggtgccggcgcgcatcctggtgctcgaagccatgccgctgtcgcccaacggcaagctggatcgcaaggcgctgccggaaccggaattcggcgcaacgccggtgggctacgtcgccccacgcaacgatctggagcgtgaactggcggcgatctgggcgcaggtgctgcaggtcgagcgggtcggcatcaccgacgacttcttcgcgctgggtgggcattcgttgttgctgacccaggtcggcatgacgctgcgcaaccgcctgggcgtcacgctgccgttgcaccggctgttcgaattgaattccatccaggcgctggccccccatctgcaggcgcaacaggacagcgcgccgccggagaacgccgaactggacctgatggatgagttgctgggcgagctggagaacttctgatgacgatgctggacgcgcaaaccgcacaactgcgcacaattgccgagcgcctgggtgcgctcccggaagagcgacagctgaccttcctgcgtcagttgcgggaaaagggggtgagcctggagcgcttgcccatcggtcgccagccctgcgagcgcgcgccgttgtcgccggcgcagagccgcttgtggttcctctggcagatggagccggacagcgccgcctacaacatatcggcggcggtgcgcctgcgtggcgtactggaccgagcggccctgcgccgtgccttcgaggcgctggtggcgcggcatgagagcctgcgcacgctgtttcgtgacgagggcggtgagccggtccaggtgatcctgcccacgctgccgttggcgctggtcgaggaggacctgtcgtcgctgccagctgcgcagcgcgaggccagcgccgctgagcgcctggaacaatccgcccggcaaccgttcgatcttgccgaggggccgttgctacggctcgatctgctgcgtctggacgacgaccatcacaacctcctgctgaccctgcatcacatcgtctccgatggttggtccatgggcgtgctgatcgacgagttcgccagcctctacagcgccttcgccaagggccgggaggccaatcttgctccgctgccgatccagtacgttgaccatgcccgctggcagcgcttgtggatggctgctggcgaggagcaacgccagctcgactactggacccggcgcatcggcgatccggccctgctgttaaccctgcccagcgatcgcccgcgtccacccgtgcaaagctaccgaggcgccgcgcagaacttcgagctgccggtggcgctgacgaacagcttgcgcggcctggcgcgcagccagggggcgagcctgttcatggtgctgctggcggcctacgaggtgctgctgatgcgttacagcggccagcgcgagctgcgcgtcggcgtgccggtggccaaccgcggccgcgccgagtgcgagcggttggtgggtttcttcgtcaatagccaggtccagtgcagcgaaatcgacgagcgcgcctcgttcgcccagttgctcggcgaggtgcgccaggccgtgctggatgcccaggcgcatcaggagctgcccttcgagcggctggtggacgcgctacaaccggagcgtagcctgagccacaaccccttgtttcaggtggcctgcaaccatctgccgagcgctcgcgacgcgctgcgcgaattgcccgctgtcggaggcgatcggctgacgctggagagcctgacgctggacgccggcatcgccaagttcgacctgatgttgcagaccgaggagggccgtgacgggcaggtgcgcggtcagttcgtgtacgccaccgacctgttcgatgccgcgaccatcgagcgcctctgcggacactttctcaacctgctgcacgcgttggtggccgatccgcagcagccggtggggcagctaccgatgctggcagcgcccgagcgcgagcagctgctgcacggttggaatgccaccgaggcagcgttccccgatgccgttcaattgcaaacgctgctggagcaacaggcctcgcgtagcccggatgccctggccttgcaattcggcgcacagcgcctgagctaccgcgcgctgcacagccgcgccaaccgtctggcacgctggctgcgcgggcaaggcgtggggccggatgtgctggtcggcgtggccgccgaacggtccgtcgagctggtggtggcgctcttggccatcgtcaaggccggcggcgcctatgtgccgatggatccggattacccgcgcgaacgcctggaacacatgctggccgacagcggcgtgacgctgctgctgacccaggcgcatctgcgcgaagcgttgccgacctcgaatgcccggctgttctgcctggatagcgactggccgcaggtgcaggagctggacgacagcgacttgccgaccctgggcacgccgcagaacctggcctacctgatctacacctccggctccaccggcaagccgaaaggcgccggcaacagccatgcagctttgatcaaccgcctgcactggatgcagaagcaataccagctgaccgaaaacgaccgggtgctgcaaaagaccccattcagcttcgatgtctcggtctgggagttcttctggccgctgatgaccggcgcagcgctggtggtggccgagccgggcgcacatcgcgatccgttggccttgcgcgaagtgatcaacgccggcgaagtcagcgtgctgcatttcgtcccgtccatgctgcaagccttcgtcgcttccggcgagctggatcagtgcccgtcgctcaagcaggtgatgtgcagcggcgaggcgttgccctacgaactgcaacagcaattccgccagcggcacgcggccaagctgcacaacctctacggtccaaccgaagcggcaatcgacgtcagccactggacttgcgaggaggaaaacgagcggcatgtcgtgcccatcggtcggcccatcgacaacctgaagctgtacatcctcgacgcctggctggagccggtgccgcagggtgtggccggcgagctgtatatcggcggcgtcggcttggcacggggttatcacgcgcggccagggctgaccgccgagcgcttcgttgccgatccgttcggtgaaggcgggcgcctctatcgcaccggagacctggcgcgttggcgcgaagatggcgccatcgaatacgtcgggcggatcgaccatcaggtgaagatccgcggcctgcgcatcgaactgggcgagatcgaagcccgcttgcaggctcatccgcaggtggaagaagcggtggtggtggcccgcgacacgccgcagggcaagcagctggtgggctacgccgtggctggttgcgacggcgacctgttgcgtcaggccctggccgagcaattgccggactacatggtgccggcgcgcatcctggtgctcgaagccatgccgctgtcgcccaacggcaagctggatcgcaaggcgctgccggaacccgacctcagccagccgcaggccgattaccaggccccggcgacggcgcgcgaagccttgttggcggagatctggcagggcgtgctgggcgtgcagcgggtcggccgcgaagacaatttcttcgagctgggcggggactccatcgtctccatccaggtggtcagccgcgcccgccaggcgggattgcaactcagccccaaggacatgttccagcatcagaccctgcgcgccctggcggcggttgtgcgtgacgccgcggtgcaagacgtgcaagggccggagcagggcgaaacgccgctgctgccgatccagcatgcattcctcgccacgcccatgccgcggcgcgctcattggaaccaggcgctgctactggagccccgcgaaacgctggatcctcgtcggttggccgaagccttgacggcactggtcgctcatcacgacgccctgcgtctgcgtttcgccgccgacggcggtcacgccgtgcacgccgagcagtccgatgccgaactgctctggctgcgtgaggcggcggacgccagcgagctgcaaaggcactgtcacgccggccagaccagtctcgatttggagcatggcccgttgctgcgcgtcttgctggtgaacatggccgacggcagccaacggctgttgctggcgatccatcatctggtggtcgatggcgtgtcctggcgcatcctgctggaagatctgcaggcgctctaccggaaccaacccctggcgccgcgcagcagttcgttcaagcgctgggcgcagcacctggttgaatggggcggcagtgaggatctgacgacggaacgagcctactggcgcgctcaactggatggcaccggtgcgacgctacccgaagcccgcgctgacgcccgcctgatcgagcgggaggcacacacgctgcggctggagctggacgaagccaatacccgcgcactgctgcaacaggcccccgcggcctaccgcacccaggtcaacgacctgctgctcacggctctggcacgcgcgttgtgcgcctggaccggcactgacagcgcctcgctgatgctggaaggacacggccgcgaaaccctgtccgaggacatcgacctgagccgcacggtgggttggttcaccagcctctatccggtgcgtttgcatgcctgtggcgagccggctgcggcgatcaagtcggtcaaggaacagctgcgcgcggtgccgcgtcgtggtctcggctacggtttgctgcgtcacctcggcgaagggttggacgatttgcacgagccgcgcgtgacgttcaattaccttggccagttcgatgccagtttcgccgacgacgcgctgctgcgtccggccagcgaaagcgccgggccgaaccgcgatggcgaggcgccgttgggcaactggctgagcgtcgatgggcaggtgttcgacgcccgcctgggcctgcgcttcacgttcagccgcgagatgttcgatgtcgcgacaatcgaaggattggcccgcacctatctcgacgaactgcgcgccttgatcgctcattgcctcgaaggcgaggcgggcggggtgaccccatcggacttcccgctggccggtatcgatcaggcgcagctcgatgcgctcgacctgccagccgtgcagatcgaggacctctatccgctgtcgccgatgcagcaaggcatgctgttccatgccctggacaacccgggttcggggctctacgtgaatcagatcagcgtggcggtggagaacctcgacccgtcgcgcctgcaagcggcctgggctcaggtggtggcgcgtcacgaaaccctgcgcagcggctttctctggcagggcgggctgcgtcagccgctacaggtggtgcaccgccagctgccggccgaagtgcgggtgatcgagggggaaacggacgtcgtcgccttcgccgaacgcgaccgcgccgaaggcttcgatctcgccctgccacctttacagcgcatgaccctgttggcgctgagcgacggccgctggcagctgatctggaccatgcaccatttgttgacggacggctggagcggggcgcagctgatcaaggaggttctgcaggtctatgccggcgagtcattgccgtcaccgattgcacgctacgccgattacatcgcctggctacagcgccaggacgcggtcgccgccgaggccttctggcgcgagcggttggccgggctggatgagcccacgctgctggcagactgcctgccacgtccggccgagggcaacggccacggcgtcacctacagccattacgacactgccgccaccgaacgcctgcgggccttcgcccgccgcgagcgggtgacgctcaacacggtgttgcaggcggcctggctactgcttctacagcgctacaccggcaagcgccgagtggctttcggcgccacggtcgccggccgtccgacgaatctggctggcgcggaaagcctgctgggcctgttcatcaataccttgccggtggcccaagcgccggcggcggacgccgacctcggcgactggctgcgcgagttgcaggcgtacaacgtcgaaatccgcgagtacgaatacacgccgctgtacgacattcagcgctgggccgggcatagcggccaggcgctgttcgacagcatcatcgtgttcgagaactatccggtcgacgaggcgctcaagcagggcggcggcacaggcccgcgcttcggcgagctggtgtccaaggatgtcaccagcgtgccgatggacctggcgatacgcctcggtgatggcctggaaatcgagtaccagtacctgcgcagtcatttcacggacgaggcggtgttgcgtattcgcgccaatctggaacagatccttgcctcgatgctggagggcggcgaccggcgcatcgccaatctggcttgcctgagcgtcggcgagttggacgcccaggcgcgcttgcacggccaggcgccggccgccgaggacttcgagccggtgcacctggcgattgcccggcataaccgcgcgcgaccggatgcgtgcgtggccatcagcgaaggcgtgcgcctcgatcgcaaagccctggagcaaggctccaaccgcctggcgcggcgcctgatggcgcttggggtcggccccgaggtgcgcgtcggcgtggcgttgccgcgcggtgtcgagctgcccttggcgctgctcgccgtgctcaaggccggcggcgcctacgtaccgctggatgccgattatccccgcgagcgcctggcgttccagatgcaggatgccggcatcgcgttgttgctcaccgacagccagctacgcgacagtttgcccctggccgagggcgtcacgtgcctggagctggacgggctcgacctgtccggcgaagacgccgaccttccgcaggtatcgttgcagccgggcaacctggcctatctcatctacacctccggctccaccggccagcccaagggcgtggcggtggcccatggcgagatcgccatgcattgccgtgccatcggcgggcgctatgccatgggcccgagcgaccgcgagctgatcttcatgtccttcgcgttcgacggtgcccatgaacgctggctgaccgcgctcagccacggcggtagcctgctgatccgcggcgatgcgctgtgggcgccggaccagacgctggaacagctgcgcgagcatgcggtaaccgttgccgcgtttccgccggtgtaccttcagcaattggctgatcaggccgcgcgtgtcggacatgcgccgagcatgcgcatctactgcttcggcggcgatgcggtggccgaggcggccttcgagctggcccgccacaacctgcgtgccgagcacctgatcaacggctatgggccgaccgagaccgtggttacgccattgctctggaaggccgacgcgacgacccgctgcgaggcgacctacgccccgatcggcacggcggtcggctcgcgacggctgtacattctcgacgaagacctgcgcccggtgccgttgggtgtggctggcgagctgtacatcggtggcaacggcctggcgcgtggctaccaccagcggccggaactgaccgccgagcgtttcgtcgccgacccgttcggcgagccgggtggccgcatgtaccgcaccggtgacgtcgtgcgcggtcgctccgacggggtcgtcgagtatgtcgggcgtatcgatcatcaggtgaagatccgtggtttccgtatcgagctgggcgagatcgaagcccgcctgcaagcccatccgcaggtgcgtgaggccgtggtggtcgcccgtgatggggcgagcggcaagcagctgatcggctacgtggtcggtgacgtcgatggcgacaccttgcgcagctatctgcgcacgcagttgccggattacatggtgccgacccagatcctggcgttgcagcgcctgccgttgtcgccagccggcaaagtcgaccgcaaggctctgccggagccgagctgggaaggggccggctatgtcgcacctcgcaacgacgccgagcgtgtgctggcggcgatctgggcgcaggtgctgcaagtcgagcgggtcggtatccacgacaatttcttcgacctggggggcgactcgatcctcagcttgcaggtggtctcccaagtgcgccagagcggcgatccggcactggacatccgcctgcgcgatcttcttcagtaccagaccatcgccgcgctgctggagcgccgcgacgcacagcccaccctcgtggccgagcaattcgcaacatcggcggcgcaggatggcgagtgcttcgggctgctgccgatccagcaatggctgttcgagcagggattgcaagagcccgaccatttcaaccaggcggtgctgctggcgtgccggcagccgctggactgcgcacggctcgaagcggcgctgcgcgcggtcctgagtgagcacggcagcttgcgtctggcgttccagcggggcacggacggtcagtggcgccagcgtcagcaggacatggacgcgctccggctggatgaggacccgctgctgtgggttcgtccggcggccgaccccgcggcgatggtaaccatcgccaatcaggcccagcgcagcctgtccatcgcccaggggcgcctgttgcgggcggtctacagcgaactggacgacggcagccggcgcctgctgctggtggcgcatcacctgggtgtcgacgcggtgtcctggcgcatcctgctggaggagctgcaacagacctaccggcgtctgtgcgaagggcaggcaccgagctttcccgcaccgagctgcagctaccgggcgtgggccgatggcctgcgcggctatgccgggcatccgcgcctggcggcggaaatgccttactggctggctcagaccgagccggccgggctggtcgatctgccgcgcgacaatccgcgtggtcacgcccgggtggagtatcgcgagcaggtgcagtggagcctggcgccggagcagaccgagcgactgctgaaggtcgccccggaggcctaccgcacgcagatcaacgatctactgctgaccgccctgggccgcacgctgtgccgctggagcgacagcgcttcggtgctggtcggcatggagggtcacggtcgggaggacttgttcgatgatctggatcacagccgcaccttgggctggttcaccagcctgttcccgctgcgcctgacgccaggcgagggcggttacgcccaggcgatcccggcgatccgcgatcagctgcgcaccttgccggagcggggagtcggctacggcgtgctgcgttacctgggtgacgagtcgacacgtcgacgcctggcggaacgggcacggccacaggtcatcttcaactatctggggcagttcgatcagggcttcgatgaccaggcactgttcgcgccggtgcagcaaagcgccggcgatgcctacgccgccagcgccccgttgaatgcctggctggagatcgtcggccaggtatacgacggacgactgaccctgcgctgcgtgttcagccggcgcctctatcgccgttcgaccgtcgagcagctgatggccgggctgcaggaggaactgcaggcggtgatcgagcattgctgcgcgaaacacggcgaacgtcaggaacaggcgtgcctgcccgcatgaacaaatcatcaatcaactacccagggttggtccggtgacatgccgggccggcgatcccttgagcgaggctgcaatgctgcatcaggaactgtccgcttttctcgatatggtcgacgaaggccgccagagcgggcgcccggccctgcacgagttgccggtgagtcgcgcgcgtgaagacttcgaggccgcatccgaagccctgaaagccggcgcgccgtcgttgccgatggagcgactgacgctggaactggcggggcgaaggttaccggcccggctgtatcggccgaacccagtgcggccattgcccgtgatgctgtatttccacggcggcggttacacggtcggcagtctggattcccacgatggcctgtgtcgcaccctggctgacgcctgcggttgtgcggttctcgcggttggctatcggctggcgccggagcatccgtttcccgccgcgcctgatgatgcacgtgcggcctggggatggttgcaggctcatggcacggagctcggcctggatctggcgcgggtggcgctggccggcgacagcgccggcgccacgctggccagcgtcctggctgcgcaactggcggcggagggcggtccgtcaccctgtgcccaactgctgttctacccggcggtggatgcccaaggaggaagcgaatcgcgtgagttgttcgccgacggctacctgctggagaatgccacgctggattggttctaccgccactatgcgccggaggagtcgcaatggcgtgactggcgctgttcgccgctgtacgccgcagcccgcctgcgtggcagtgcggcggcgctgcttctggtggccgagttcgaccccttggtggacgagggcctggcctatgcgaaggcgttgcaggaacagggcgtggatgtcgaagccacgctctgcaagggactgccccatgacttcctgcgtatgtccggcctattgcccgatgtcgctgcgtacttccatcagattgcccgctttcttcgcaggcgctggtgacgagaagttcaggtctgcacccagcaggagcgctgggcccttttatcccctattgggtgccaccgccgcactagcggcgagatgcctcgtcaggtttgcgcgtgactgagcctggctgcaagcatctatcacgggatcggcctccacagccataagtggcgcgttttgacgccgtttgcgtacctctcggcaaacagcgctaacaagtcttcagtaaaccgctacgctgccgaaagcttaaaatggcgcacgcggatggtccgctcgataagatcggctcgttcctcgatgacagtcgaacggcttggtgcgtcctcgctcaagcctcgggtgagtaccgccgtgaatgtatggcatccacaaaaagaagggcagggagcatggtggatcttaaaaccggattgccacaacagggtgcgccgcatgtattggtgatcgacgatacgccggatgagctcaagggattgcttacgcttctcagggcgcaggcatggaaagtctctgtggcaaccgaggcctaccaaggctatcagcgggcgctgaccacccgaccggatatcattgtgctggatgtcaggatgccccagatgaacggcttcagcctgtgccgtctattgcgcgaggcctcggtgacacgccgtgttccgatcctgtttctgacctcttcggggtcgcttgacgagcgtctggaagggttgaccctgggtggagtcgattacgtactcaagtgctgtgaacctgaggaggtgcttgctcggatccgcatccacctgcagctgacgtggcgtgatgaaccgcctgccgcatcctttcacgagacgaccaatggcgacaaacctgatcaggtgatcctccgggcggcgatgcgcctggtcgatgagcggctggaggatctgccgtcgctgtccgtcatttcgcagatggtagggacacacgagaaacgcttgtcgatgatctttcgcgagcacttggggacgaccgtattcggctatatccgcgaagctcgtttgcgtcgcggccagaagttgcttaccgacggatccatgagcattcaggatatcgctgaactggtcgggtttcgcagtgcgtgcaatttcaccacggcgtttcgccagtggttgggaatgacccccacacagttccgtcaacaaattcatggcgcccgcgaggctgactcggttcgttccgcatgaatggacgactgttgtgttggctgctgcttggaatctgcttttcgacctccggccttgcacaagccgaggcttccgtaagcgtatgtaaagacgagcatatcgagcttaaacccgttacgcgggtcattgaagaccgtagcgggacgttgagcttggcccacgtcctgacccgttttgaggatgagtccggtgtccagacggatctgccgcccgcggggtatacccactcggcgttttggctccgtctggagttgaagaatgagggaccgagcacctgctcgcgctggctgacggtgggcgcgccgcgcctggaagatgttcgcgtttataaaaaagtgccgggtggctgggaatcgatgcgggcgggaagcctttatccgctccacgaatggtcctatccggcgcggcagcccctctttcctgtatcgctgccggctggtgaaccggttgtgttgatcgcgcgggtcgctagcggcacgcatatgctggtaaatcccgaactctggtccgaccttgcgcgcttccaacatcgtcagtccaccgacctgtgggacggaatcacccttggcatcgtatgcctggtggccctgttcagtctgatgattggcgcaatcttccgctcctgtctggtggtcgtgcatgccggcgccgtcagttcttacatcctgctgacctgtgtcctgaatggctatctggtgctatggccggcggcgcttggttggacgcgagaactgatggtgctggcaagcgttatctcgtttgcatgctttctaggctacgccgcggtggtgctgcgtgtcgggcagttacccagagccatcggtgtgttgttctgtctgcagttcgtcgcgcatgcaggcgcgcgcctatggtcgttggtggacccggttcagggaggtgaagccgccctgctaatgatgaaaggtatctatctgctttttccgttgacactgttggtcggctggctgaaaggggtgcgctacgactggctggcctggttgctgccatcgatattcatgttgctgctggctgcccgctattttctcgagctgagcggcataccctggcaatcacctgagcagcgctacagcctgtcgtcaaccttaccgggtgtcttgctgcttttatgtacactcgccgtcgaggtgagccgcgcgagatctagagagaagcgagcgctgctcgatctcgaccatctcaaacaggccgagcacgaacgcctcgagcagacggtggcactgcgtaccgaacagctgcgcgaatcgttgcgggcacgcagtgggctgatcgctcggattagccatgatttgcgttctcctttgatcagcgtgattcattacgcccgtttgttacagaaggggccggcgcacgattatccgcagaagatcgagcgcaacacgcggcgacagcttgagttgatcgacgatctgttggagttttcgtctggcgagctgcagcaaatggagctgtcgcttgcgcccggctatctctacggctttttgcgtgaagtggaagatgaggctgctttcctggccactcgccagcgcaacgagttcgacgcccgcttcgaccaagaccttccgactctggtgcatgccgattttcggcggctgcgtcaggtactgatcaacttgctggctaacgcggccaagttcaccactgagggtcgcattcgtttcgaagtctgctgcgttaacagcagccacccgaatcaagtgcagctgcgcttttgcgtgagcgacaccggcatagggcttgacccaaaagaccgcgagcagttgatgcggccgttcgggcgtggccgcaacgcgcagcggtacgagggcagcgggcttggattgtcgatcgttcaggatttgctgcagcgcatggacagcgaactggagctcgaagcgcctgtagaaggtggaagccggctgagctttaccttgcagctagcctgcgcaactgagcaggacatcgattttcccgcttcgggtggttcgccaacggcggtggatggagctggcaggcacgtcctgctggtcgacgatatcgagcagaatgtggagtggctggctgatctcctgggtggctatggatttgaaatttccactgcgaccagcgctgctcaagcgctggcgtgccttgcggatgctcccgtcgacctgatcgtcgccgatcagatgatgcctgacctggacggctgggagttcctgcgccaggtgcgtagggactggccaggaactccggtggtgctttactcggcggcacccgccagacgaccggcgggttacccggagcacctcaagttcgacgccgtgctgatcaagcctgctccgaatggtgagttgcttcgctgtgttgatgagcgggcatgttatcaagggcaaacgaccgcaggcgaggtcgaatcttgactcctctacgcggaatggcgttgctagcgatgctggcagcatcatctacggcggcgcaggcaggtctgtcagacgatgccgaatctactcggcgagcagagctggttctcgacgacataacggtcacagcagacgctcacaacctccgagaagcgggcgcgcggagcggagtggacatagtcgaaggagaggccatggagctccccgctgagcacgggcctggcttgctcgagcaacgcgttcccgggctggtgctctctggccatgatgcgcgctccgccggtttcgggttgcgcggatacggcgcgacggctttcaacgatgggctggacggcagtgttgggatcttcgttgacggtgtatatctcggccgtcagggcatggcgctcggcgactggctcgatatcgatcggctcgaggtgctgcgcggtccgcagaacgcagcgtttggtaagaatagcagtgcgggcgcgctgaacatcgtgacccgacagccgagtccggagttcgaagcgcgtggcgaaacgagtgtgggctctcggggcttgcggcagtaccggggaagtttctccgggccgttggaggacggtgtgctggccggtcggctgagtgtctttcatagtgagcgcgacgcgctggtcgagaatcgttacaacggcgctgggctgaacgacaaggatcaacaagggctacgggggcaactgctatggacgcccaccgaagtgttcagtgctcgcctagtgggtgagcacgggagggccgctgattcgggcagcgcattgatggctagccattacagcgatcagacacgccgtcgcgccgctttcgtcggctacgatcttccggagaccgatcccaagcagcgcgaggtccagcatgacgcgccaaccagcagccaggtgtcgcaggatgccgtatcactggagctgaactgggcgctggcgtcgacgatgaagctgaccagcatcagtgcacatcgcgactggacttatctcagcaagcgagatggcgacagcacggcgctcagagtcgccgagggaaatgtcgatctgcggcaccggcagttcagtcaggagctgcgtctgagcggttcggccggaccacatctggactattcgctaggggcttactacctgagtcagcacgcccgacgtgagaccgatgtccgctttggcgaagaggccgctgcctggttcgttggtgatcgtctggacgagatcgagcagttgttcggcatacgctttcaggatccggcgcaggttcctacgtccctgctcaacggtgcgggccagcggtacgcaggcgcgcaggaagctgaaagccgcgcggtgtttggagagctcgcgtggcgtccctttgaacgcatcgaattgaccggagggcttcgctacgggcgcgagtacaagcagggttggatgtcgcgggaggttaagaacctggcctctctgaacggtctgccgccggtaatccaaggcggtggtcagttgcttcgacagattgcgctagggggtgcgtattaccggcgtgactcgatcgaagagcggcacttgaccggtcagctcgggctcagctaccagatctccgatgccgttacgggccgggttggctggtcgcgcggataccgaacgggtgggatcaatttcgatgtcgtgggtcctacggccgcaccgacgttcggctcagaacgggctacatcgttcgaagtgggccttgaaactcgcttctggggcgaccgtgcgcgggccgacctgacgctttatcagacggatgtcgatgattatcaggcgctgacctacagccctccggccacgctcttcgcgcctccgttgcgtgacaacctgatcaatgtcggagaggtgcgtctgcggggaatcgagctggactccgcctggcgcgtgcatcctcgcaccgacctgcggctgggcgtcgcctggagcgatgcgcgttatggtgcgtttcgcaacgcgccttgcccgcccggcgagggccaatgggttcgcgacctgagtggcaaacgcctgtacaacgcaccggaatggaatgtgtcgaccgggctcgattactggcaaccgctggtgccggggctggaaagcttcggcggcgtcgattacagcttccgaagcggctattacggcacgctcgaaggtggagagggcagctatcagccgagctacggactggcgcatctgcgctttggcgtgcgtcggtcggaccgtggctgggaggtcgaaggttgggtgcgcaacctgttcgaccgccattccgtcacggcagtctatgccctgcttggcgcaggcgattacggtgtgctgaccggcgaacctcgcatggcgggtgtaacggtcagggcacgctactgaaatcagtcacgccgcatcactgaacacagccgttcgtcagactgtaaaggattaattcttagccgtgcgctgcagcaaagccggcgtccgctctcgcaaacttttcgcttttgaactctacgcataatccgccgcaaccgaccggctgaacatgcgggccgggcattcattacggcttttttggagtttggcgatggcagtccgtgaacaggatttcgttgatgtgggtaagcgtctgctgcggtggaccgttgcgttggctggatcggctacagccccttggatttttgctcaaagcttgccggatgccggtcagctgctgaacgagcaccagcagagccagccgtccgcaccgcaatccaccgagccgccgcctgctttcgagctgccatccgaagccgtgcgcgaaggtcagtccggcttgcgcgtaacccttcgttcgattcgtttttccggcgacacggagttggccgaggctgaggatctgcagcgcctggttaaccccatggtgggcaaaaccctcgatcatgccgggctccaacagttgaccgatagcctgacccgctatctgcgtggccgcggctacgtgttggccagagcgtacctgccacgtcaggatctgaccgagggcaatctggaaatcgccctgaccaagggcaagttgcaatcggatgcagcgcgcatcgaggttggcggagcgactcgcagctcgaccggacgcctacgtgacattgccgaggcagcgctgccccaaggcaaagccctgcgtgccgaagacctggagcgtgcgctgctgctcatcaacgaccagccaggtattaccgcacaatccgccttggaacgcggcaccgagcccggcagcagccggttgctgatcagcgctaagcaagggccggttctcagcggtggcgtgtcgggtgataactacggaaaccggagcacgggtagcgcccgcggcaatgctcagttcaatctcgctgatccgctgggtatcggcgaccagttttccctcggcctcagcaagaccaccggcagcaccatagtgggtgccggctatagcctgccgctgacggcggacggattgcgcctgcatgccgctgggtcgtacctgcgctatcacgtcgaccaggaacaattccgtccgttgaacctgcggggtaccgccaagagcggatcgctgggcctgagctatccgctgatccgctcgcggctgcagaacctcaatctttccgggacctacgaatacaaggcgttgaaggacgaggcactaggcatcaacttgcgcgaccgcgaactgaacaacttcaccgtcgcgctttctggcaaccgcttcgatggtttgggcggtggcggcgttaccgacgctggaatcgctctgactgtcggccagcttgatctttccggcaaccgtggcgacgaattcgccgatcgcatgggagcccggagcgatggcggcttccataagctcaatctgcggctgtcgcgcctgcagagcctcggagcggcaagtgactggacgctgttcgccggtgcttccacgcaatgggccagcgggaacctggactcatcggaaaaattcctccttggcggtccagccggggtgcgcgcctatcccgtgggcgaggcgtcaggcgaccacggctggttggccacccttgaactgcggcgcaacctcgatctgggtttgcctggagtcaagctgcagacgcttggcttcgtcgataccggccgcatctggcttcacgaggatgcatgggcgggttcggtcaacaacgcgggcgataccaaccgttacgacctgcacgcgttaggtctgggggccaacgtgtgggtgggcgacttcagcgttcgcaccgctgtggcccgcaccctggataacaaccctggccgcggcctttccggactggatgctgacgggcgctcaagcgactggcgcgcctggttacaggcatcgctggctttctgactatcaccgtatcggtctttttcgaaaaggaataacgcatgaagagcgcttcgttgaaccatgtttaccgcctcgtctggagcgatgccgaacaggctttcgttgccgtttctgaacttaccgcagcccgtggcaagcgtggtggcgtcgttggctttctcgccgccctgggtctgctgagcatcggcgcggcccatgccgccgacttgcctaccggagggacgatagtcggcggtagcggcgctatttcccaaagcggcaaccagatggtgatcgatcagtccagcggcaagctggtaaccaactggaacagcttcgatgtgggcgccggttcaggcgtcaccttccatcagccgagcgctgacagcatcgccttgaaccgggtgattggcggcggtagcgccagtcagatcctgggcaagctcgacgccaatggccaggtctggttgctcaaccccaacggcgtcgtgatcggccgcggcgccgaagtgaatgttggcggtctggtggcctcgtcactgcagatcagcgatgaggatttcctggcgggtaagactgccttgagcgcgggtgcaggtgccggagccgtgatcaaccaaggcacgatcaacgctgcgaagggtggagtggtcgccttgatcggtccgcaggtcagcaacagtggcagcatccacgcgcctggcggcagcactgtgttagcggccggcgacaaggttgcccttgatttcaacggtgacgggctggtgagcgtcaacgtcgagcgtggcgttctcgatgctctggttaagaacgaagggcacatcagcgcagacggcgggatggttgcgctaagtgcgcgatcggccgacgccgcgctaagcagcgttatcaacaacaccggcattatcgaggccaaagggctcgtcgagcgcggcggtcgcattctgctcgacggcgacgcagagggcggtctgacccaggtcgcgggcacgctcgatgtctcttcggaccagggcttgggcggcgacatcgtggtgaccggggaacacatcgccgttgccaatgcaacgctggatgccagcggcgtagctggcggcggcactataaaagtcggtggtggctggcagggccaggatgctagcgtggccaacgcccgccaggtgatcgtggacaaggacgttaccttcaaggcggacgccactggcaccggcaatggcggcaccgtggttgcctggtcggacggtgacaaccgttttgccggcaagatttccgtgcgcggcggcgagcaaggcggcgacggcggcaaggccgaggtctctggcaagcagacgctgcactatgcgggcataaccgacgcccgcgccaccaaaggccgcacgggtgatctgctgctcgatccgacgcggatcgatattgtcggcggaggcaacgctggggattcgattgcgggcgccacggtgaccgaaaaggcgctggaagctcaggcggccaacgtcctgttgcaggcaaccgagcgcattcactttggtgatctcggtctgaatggcggcgatggcaagatctccatgcaggaagacgttagtttccgcgcggaagtggttaacagcggcagcacccgcaccatgattacgtttgaaaactcaaacaacaccttggaggtgttcggcaccgggagcatctatctacaagccggagggggcactactgggaccataggggaaagtaattccgctgggctgacaggcaatctgggcgtcttcaatctgattgcccatggcccaggcgacaacccggacgtggccgacatcccggcacatatcgtcgatcagatcggtaatggcactccgggcgccggcacaatcaccgttctcggcgcggatggagcgaccttggccggcaagctagagaccaacggcggttatgtgcgcatttccgtggactcggatgccggggtcaacaaaggtggtgccggaaacttggtgatcaacaaaggtgctgacatcaccactcatgacggcaatctttatctgtcattcggtggtagcgggtatagcgctacgctgcttagcgatatcacgctgggcaatggtcgcctgtacttcggcgatgccattcctggtgggatcaccaaacaacttggctcatctactggagagaagaagctgggtggcctgctcagcctgagcggcgacgtcaacttcaacacaccgctgaccatgctcggaggcgcctcgatttataccaacggcgcgatcaatttcaccagtacggtcaagctggacactggcaacgacctgctgacgctcagggcaaacaatgttgatttcaccagcgcgacgctgcagaacctgtctactgcgagcatccgcctggagccctacgatgcgacaaccaacatcaatctgaacagcagcagtggcaatgctggcggcggcatcttcctcgacgcgagcgcgccggccacggacatcagcagcctcgtgggcatcaagaaccttaccattggtcgtgaggatggcagcggcaccaccaccgtggatgcctccgggttcggtttcaacgccaacgacaatctgactctgctcaacggcaatgttcagatcgacggcgagttgcgcaacagcaacgcgaccggccatgtcatcgcccaggcgggtgaaggcgatgtggtcatcaatgctggcggtagcgtcaccgctcaaggcagcggcgacgccgtggtgctggttgcggcgcggaacttcgtcaataacgcaggcgccaacgcgctggtcgccaccaacagcaaaggtcgctggctcacgtattcgaccaatccctgggatgacgtgcggggcgggctcgacattgacttcaaacagtacgccaccgggtacggtcagccggtccttggcactggcaacggtcatgtctatacctacgcacccaaggtcaccgtcgagttgaccggcgaggttcgcaagacctatgacggcaatacgaacgcaaccgtcgatgcttcgactcacttcgcaatgagtggcgctatcgacggtgacaccatcgatgtcatctccttcggcgacgcttcttactcggacaagaacgccggggcgggcaaaggggttaccgtagacgacgtgcgggtttccgaggcgaccaacggcgctgtaaaggtttacggttatcaagtcgatgcttcgagcgtcagcggcgacatcgggacaatcgacaggaaaaccctgaccgccaccgctgacgtagccgacaaaacctacgacggtaccaccggcgcggct

SEQ ID NO: 25 - DNA, 75163 bp, Pseudomonas sp.
aattccagacaacccggagcatcaaacctctcccaaccagcgcggcttgcgcttctccagaaaggcgttgagcccctcctggccttccgggctgacgcggatgcgggcgatggcattttccgtataacgacgcaacgccggtgtgaccgacgcgctgctggcttcgcgcagcagatccttgctggcacgcatggcctgtgggctgttgagcatcaggttatcgagccagccgtgcagggcgtcgtccagttcggcggcggcataggtttccgagagcaggcccagttcgcgggcgcgttcgccgctgaagcgttcgccggtcatggcgtagcgccgcgcggcgcgctcacccatggccttgacgacgaatggactgatcacggccggtgccaggccgatgcgcacctcggagagcgagaacaacgcgtcgtgcgcgccaatagccatgtcacaacaggcgaccagcccaaccgcgccgccgaacgccgcgccttgcaccacggccagcgtcggcagtttaaggtggtagaggctgtacatgagttcggccagctcacgggcatcattgaggttggcgttgaaatccagctgcgccgattgctgcatccaggccaggtcggcaccggcacagaagtgcttgccgcgtccgcgcagcagcaagaagcgcaaattcttgttggcctgcacctggtcgatagccagcaccagctcgcgaatcatctcggcattgaaagcgttgttcttctccgggcgatcgagccagagcgtggcgaagcctttctcggcatattcgagttcgatggtgttaaaggtcgacgtgctcataaatggttcctgcagacgaaggccttcgggccttggctagaagcttgaggcaggacgtccaggctccagcctctggcgcggttatcgttttttcccttacatccggaatacaccaaagcgggtcggttcgatcggtgcgttgagactcgccgagagtgccaggcccagcacatcgcgcgtctgcgccggatcaatcacaccgtcatcccacagccgtgcactggaatagtagggatggccctggcgctcgtactgctcgaggatcggctgcttgagctgctgctcgtcctgatcggaaaactgctgcccgctgcgctcggcctgttcacgcttgacctgcaccagtacgccggccgcctgctcgccgcccatcacgccgatgcgcgcgttgggccacatccacaggaagcgcggatcataggcgcgaccgcacatgccgtagttgccggcgccgaagctcccgccaatgaccacggtgaatttcggtacctgggcgcaggccaccgcggtgaccagcttggcgccgtgtttggcgatgccaccggtctcgtatttctgcccgaccatgaagccggtgatgttctgcagaaacagcagcgggatgccacgctggcaggccagttcgatgaaatgcgcgcctttctgcgcggcttcggcgaagaggatgccgttattcgccaggatggcgatcggatagccgtgcagatgggcgaagccgcagaccagtgtggtaccgaacagggccttgaattcgtcgaattcgctgccgtccaccagccgtgcgatgacttcgcgcacgtcgtagggctgcttggcctgggcgggaatcaccccgtacagctcctcggacgggtacaacggtgcgcggggttcccgggcctgcagatggccgagcttctgccagttcaggttggcgacgcagcgacgggcgatggccagtgcgtgttcgtcgctttcggcgtagtggtcggcaaccccggaaatcttgcagtgcacgtcggcaccgcccaggtcctcggcggtgaccacttcgccagtggccgcctttaccagcggcgggccggccagaaagatggtcgcctgattgcgcaccatgatggtctcgtccgccatcgccggtacgtaggcgccgccggcggtgcacgagcccatgaccactgcgatctgcgcgatccccatggcgctcatgttggcctggttgaagaagatgcggccgaagtgttcgcggtccggaaagacttcgtcctggcgcgggaggttggcgccgcccgagtcgaccaggtagatgcacggcagccggttctgctgagcgatggcctgggcacgcaggtgttttttcacggtgagcgggtagtaactgccgcctttcacggtggcgtcgttggcgatgatcatgcattcgacgccttcgacccggccgatgcctgcaaccacgccggcggcggcgacgtcctcgccgtacacctcgtaggcggccagaggcgcgacttcgagaaacgccgaacccgggtcgagcagggcgtcgatacggtcacgcaccagcaatttgccgcgcgacacatggcgctgctgggctttctcgccgccgccttcgctgaccttggcgagcagcgcgcgaagagtttccacctgcccgaacatcgcgtcgcggttggcggcgaattcgggcgagcgggtgttgatttgggtgttcaggatggccatgacgaactccgttcgggctacatgcttcaagccacaggctgcaggccggattgcctgtagcttgcagcctgcagccgcttttatttcgtttcgttgaacaactcacgcccgatcagcatccggcggatctcgctggtcccggcgccgatctcgtagagcttggcgtcgcgcagcagccggccggtggggaattcgttgatgtagccgttgccaccgagaatctggatcgcctgcaacgccatctgcgtcgccgcttcggcggtatagaggatcacgcccgcggcgtccttgcgggtggtttcgccgcggtcgcaggcctgggcgacggtgtagaggtaggcgcggctggcgttgagctgggtgtacatgtccgccaccttgccctggatgaactggaactcgccgatgctctgaccgaactgcttgcggtcgtggatgtagggcacgaccacgtcgaggcaggcctgcatgattccgaccggtccgccggccagcaccacgcgctcatagtccaggccgctcatcagcaccttgacgccgccattctcgacgcccagcacgttctcttccggcacctcgacgtcatcgaagaacagctcgcaggtgttggagccgcgcatgccgagcttgtcgaacttgttgccgcggctgaaacccttccaatcgcgctcgacgatgaaggcggtgatgccatgggcgcccttgtccaggtcggtcttggcgtagatcacgtaggtattggcgtccgggccgttggtgatccaggtcttgctgccgttgagcacgaagcgatcgcccttgcggtcggcgcgcagcttcatcgacacgacgtcggagccagcattgggctcgctcatggccagcgcgccgacgtgttcaccggagaccagcttgggcaggtatttcgccttctgctccggcgtgccgttgcggttgatctgattgacgcacaggttcgaatgcgcgccgtaggacagccccaccgaggccgagccgcggctgatttcttcgagcgcgacgacgtgggccaggtagcccatgccggcgccgccgtattcctcgtctatggtgataccgagcaggcccatgtcgccgaacttgcgccacatgtcgctgggaaagaggttgtcgcggtcgatggcttcggcgcggggcgccagttcgtcggccacgaaaccgcgcacctggtcgcggagcatgtcgacggtttcaccgagggcgaagttgaggccggagtagttcatgtgccacctgttcgattttgtcgttgttctggttcgactgccggccgccgtgaaacgttgaatcggcgtgtcctgcaacctgttcgataccgcgtcccgacagcgacttcaggcgaagggtgcggtgggttgtcacgctgtaacctttacgttaacgtaatcccagcccggagcagctgtcaacacatcggcaggccccggaccgcaaggcctcataacaaacataagaccgaggatttacgacatgagtcttccgagttacacctgcggaccgcagaccaaacccctgttggcgatgaccatcggtgcggcgttcgaccgggcggtcgagcggttcgccgagcgtgaggccctggtcgtacggcatcagaacctgcgttacacctgggcgcagctggccgatgaggtggaccgctgcgcacgcgggctgcttgcgctaggtttgcagcctggcgagagggtgggcatctggtcaccgaacaacgcccagtggtgcatcacccagttcgcgaccgcgaagatcggcgtggtgctggtgaacatcaatccggcctaccgcctcaatgaactcgagtacgcgctcaaacagtccggctgccgttggctgatctgcgccgatacgttcaagacctccgattaccacgcgatgctccacgaactgctgcccgagctggaaggctcagcggtcggcgcgctgcgcagccacatgctgccggagctgcgcggggtgatcagcctgtgcgacaagccggtggacggcatgctgttgtggaaggggctgatgggcatggccgagcaggtcggccccgagcagctgcgccagtgcagcgagcagttgcagttcgacgatccgatcaacatccagtacacctccggcactactggcttccccaaaggcgccaccctcagtcactacaacatcctcaacaacggctacatggtcggtgagagcctgaagctcaccgagcacgaccgcctggtgattccggtgccgctgtatcactgcttcgggatggtcatgggcaacctgggctgcgtgacccacggcaccaccatgatctacccgagcgccgccttcgagccgctggcggcactgcaggccgcggccgaagagaaggccaccggcatgtacggcgtgccgaccatgttcattgccatgctcgaccacccggagcgccagtcgctggacctgtccaatctgcgcaccgggatcatggcaggctcgacctgcccgatcgaagtaatgaagcgggtcatcgacgacatgcacctggccgagatgcagatcgcctacggcatgaccgaaaccagccccgtctcgacccaaaccggaccggatgacgacctcgagcgtcgcgtcaccagcgtcggccgcacccagccgcacctggaaagcaaggtcgtcgacgagcacaaccgcatcgtgccgcgcgggcagatcggcgaactctgcacccgcggctacagcgtcatgctgggctactggaacaacccggaagcgaccgctagcgctatcgacggtgcgcgctggatgcacaccggcgacctcgcgatcatggacgacgagggctatatcaagatcgtcgggcgcaacaaggacatgatcattcgcggcggcgagaacgtatatccgcgcgagatcgaggaatttctcttcacccacccagcggtggccgacgtgcaggtgatcggcgtgccggacaagacctacggcgaagagatcgtcgcctgggtcaagctgcaccccagccaccaagccacggccgacgatctgcgcgcgttctgcaagggccgtatcgcccacttcaagacgcccaagcacatcaagttcgtcgacgagttccccatgaccatcagcggcaaggtgcagaagttcaagatgcgcgaggtcagcgtcgctgaattgggccttgccgagtaaccaaacagtgcgtgccggctagcagccggcgttccatttgccgatcagcaacgatacggagcgcaacatggcccaaccgatcagtcgttttccgctcgtcgaagacctggcctcactgcctgcggatgttcgcgagcgcatcctcgcggtgcaggagaaagcggggtttgtccctaacgttttcctgatgttggcccataggcctgatgaatttcgcgcgttttttgcgtaccacgatgctttgatggaacgtgagtccgacagcctgaccaaggctgagaaagagatgatcgtggttgcggtaagtgccgatcatggctgcctgtactgcgtcgtggcgcatggcgcgatcctgcgcatcctggccaaggatccgctgattgccgatcagattgccgtcaactaccgcaccgcgccaattagcgagcggcagctggcgatgctcgatttcgccctgcatctggccgctcagcgtggcgtgctggatgacgcctggcaggcgcggctggaagggttgggcttcacccagggggacatctgggatatcggcgcgattgccgcgctgttcggtttatccaaccgcctggtgtcgatggcgcggacgccgcccaacgacgagttttatctgctgggtcgtgtgcccagatctgccgcgagctaagcggcagccacgaatttatcgcgtgacgcggtagatatgagcccggcaggagcaggtcgggctcacagctgcatcaaccaagacaataacaagagagatacctatgcaactgaaacccctgagccgttacttcattctcagcagcctggcggcgtccgcccttggcacttcctcgatggtttccgccgcgtttctcgacgacagcaaggccagcgtagagctacgcaacttctatatgaaccgtgacttccgcgagagcggtgcgagccagtccaaggccgatgaatgggcccagggcttcatcatgaagatcgagtcgggttataccgacggcccggtcggcttcggcctcgatgcggtcggcctgctgggcgtcaagctcgactccagcccggaccgttccggcacgggcatcctgcagcgcgaccgggaatccaagcgcgcccaggacgactacggctcggccggcctgacagccaaggccaaggtatccaacaccacgctgcatatcggcacgctgcagccgatcctgccggtggtgatgcgcaacgacagccgtctgctgcccaacacctaccagggcgcctggttacagagcaaggagctcgatggcctgacgctcgatgccggcaagctgaccgacatcagctatcgcgactcctcggatagcgaggagatgaccgtcttcaacggcggtgcgcgcaatatcgtgctgggcaataccaagaccagcgacgagttcctcttcgccggtgccaagtaccagttcagcccggagctgaccggcagctactactacggcggcctggacggcatctacaagcagcacaacatgcagctgatccacgtcatgccgctgggtgagagccagagcttcaagaccgacctgcgctatgtgcgctccaccgatgacggtggcagcaacgtcgacaacgatgccttcggcgcactgttcacctacaagatcggtggtcacggctttaccggcggctatcagaagatgagtggcgacaccggcttcgcgtacatcagcggtggcgacaacatgctgatcaacctattgcagatcaatgacttcggcaaccaagatgagaagtcatggcaggttcgctacgactatgatttcgccgccctgggcatgcccgggctgactctgatgacccgctacgtgtccggtgacaacgtcaacctggccgccggtggtgaaggtgaagagtgggagcgcgacaccgacatcgcctatgtcgtacagaacggtccgctgaagaacttcggcatgaaggtgcgcaacgccacggtgcgcagcaacttcggcagcgacctcaacgaaacccgcctgatcctcagctacaccctggcgctctggtaaagccgggcgcctttttaccgcaacacctcctcgttgatccttttaccgggcctgtggcccggtttttttcaatatgtttcaggcatgtcgaaacctcgtcggcgccccgtcgttactggcatctggctcaatcggctgtttgaaaacgacgcttgcctcgcgtcgcgatcgattgttatcgtttacgtaaaggtcatccagcgacctgagccgtacctacaacaataatcaaaggctagagggcacctcatggaaccagagttcgtgctggaaacgcgcggtctgaccaaggagtttcgcggcttcaccgcggttgattccgtcgatctacgtgttcgaaagggtcacatccatgcattgatcggccccaacggcgccggcaagaccaccgtcttcaacctcctcactaaattcctcacaccgacccgcggcgacatcctctatcgcggccaatccatcaccgcgctgaaagccaatgagatcgcccggctcgggctggtgcgctcgttccagatttccgcggtgttcggccatatgagcgtcatggaaaacgttcgcgttgcgctgcagcagaagctcggcaactcgttccacttctggaaatccgagcggaccctgcgtacgctcgacgaccgcgtcatgcaactactggccgaggtggacctggagtctttcgcccagacgctggccatcgagctgccctacggccgcaagcgcgcgctggagctggcgaccaccctggcgctggatccggtggtgctgctgctcgacgagccgacccagggcatgggcggcgaagacgtcgacatggtcgtggcactggtgcgccgcgccgcggaaaaccgcacggtgctgatggtcgagcacaacctcagcgtcgtcagtcgactctgtgaccggatcaccgtgctggcgcgcggcgcgatcctggccgaaggcgactacgacagcgtctcggccaaccccgaggtgcgcgaggcctacctgggcagcgaagccggcgcagaggaggctcacgcatgacgcccatggccgaccgcgaccagctgcgggtcgatgacctgcacgccttctacggtgaatcgcacattcttcacggcgtcgacatggtcgtcgggcgcggcgaactggtgacattgctcgggcgcaatggctcggggcgcagcaccacgttgcgcgcgatcatgaacatggtcggccgccgcaccggctccatcgtggtcaacggcaacgagaccatgggcataccggcgcaccagatcccgcggctcggggtcgggtattgccccgaagagcgcggcatcttctccagcctcaacgtcgaggaaaacctgctgctgccgcccaccgtgcgcagcggtggaatgggcctggacgaactctacgaaatgttccccaacctctacgagcggcgcttcagccagggcacgcgactgtccggcggcgagcaacagatgcttgccatggcgcgcatcctgcgcaccggcgccaacctgctgctactggacgaaatcaccgaaggcctggctccggtgatcgtgcagaagcttggcgaggtgctgatcaagctgaagaagcgcggcctgaccatcgtcctggtggagcagaacttccgcttcgccgcgccgctggccgaccgtcactacgtaatggaacacgggcagatcatcgaagaaatcagcgctgccgaactggattcgaaaaaggagtttttgaatagctgtcttggggtctgacggccccgtcagaaggaactgccggttcgcagtatgtaccggtgtgcatatcgataaaggccacaacaaaaacaatcacagtgggtgactatgaacatcatcaagaaaaccgcagccgccgctctcgtctccagcatgatcgccggtgccgcacaggccgagatcagcaacgatgaaatccgcatcggctatctcgccgacatgtcgggcacctaccgcgatctgtcgggccccggcggcctggaagcgctgaaaatggccatcgaggatttcggcggcagtgtcgacggcaagaagatcgtcaccttcaatgccgatgacctgaacaagccggacgtgggcgccaacacggtccgtcagtggatcgacgagcgcaacgtggacatggtgaccggtctggtcgccagctccgtggtactggcggcggcaaaggtggtggagcagggcggcaagctggcgctgatctccggtgcggcggcgtcgagcatcaccaacgagttctgttcgcccaaccacatccactggacctacgacaccttcgccctggccaatggcactgccaatgcggtcctgaaagacggcggcaagagctggttcatcctcaccgccgactacgccttcgggcatgcgatggaagccgacatcaagaaggtcgtcgaggccgagggaggcagtgtcgtcggcaccgtgcgccatccgttcccgagcagcgatttctcgtcctacatcctgcaggcgcagggctcgggtgctgacgtggtcgccctcgccaacgccggtgccgacacggtgaattcgctaaagaccgccagcgagttcggcgtcacccaatccgggcagaagctcgccggcatggtcgtattcctcaacgatatccatgccatggggctggatgtgacccaggggctgatgctgaccacgggctggtactgggacatgaacgacgaagcccgcgcctgggcgaaacgttacgaagcgcgagtaggcagcatgccgaccatggtgcatgccggtatctactcggctaccacccattacctgaacgcggtgaaggctaccggcagcgacgacacccagaccgttcgggcagagatggccaagaccccggtcaacgacatgttcgccaagaacggcaagatccgcgaggacggccgcatggtgcacgacatgtatctggtccaggtcaagaagccggaagagtccaagggtgagtgggacctgtacaaggtcgtacgcaccattccgggcgacgaggcgttccgtccgcttgccgagagtcagtgcaagctggtcacccagagctgatcgatctgcaccgagccatccccggccaacgccggccggggcgtcacggacttttccgggtagtgaatcatgactctcgttttcggcgttcccctgagcgtattgctcgggcagttgctgctcgggctgatcaacggctcgttctacgccttgctgagcctagggctagcgatcattttcgggttgctgcggatcatcaattttgcccacggcgcgcagtacatgctgggcgccttcgcggcctttctcgggctcaattatctgggcatcaactactgggccgcattgctgctctcgcccttgctggtcggtctgctcggcatcggcatcgagcgtgggttgctgcggcgcatcgccggtgaggatcacctgtacgggctgttgctgaccttcggtctggcgctgatcgtcgagggcagcttcgtcaagctattcggcgtctccggttcgtcctatcccatgcccgagatactcaagggcgggcacaacctgggcttcatgttcctgccaacgtaccgcggctgggtcatcgtcgcggcgctttcggtgtgcttcgtcacctggtacatgatcgagcggacccggctgggttcgtacctgcgcgccggcacggaaaacccgaagctgatgcaggccttcggcatcaacgtgccgctgctgatcaccctgacctacggctacggggtcgcgctggcggcgttcgccggcgtgctcgcagcacccatctatgcggtgacgccgggcatgggatccaacctgctgatcgtggtgttcgccgtggtggtgatcggcggcatgggttcgatcatgggcgcgatcatcacaggcctggccatgggattgatcgaggggctgaccaaggtgttctaccccgaggcggccaacacggtgattttcgtcatcatggttttggtcctgctggttcgtccggccggtctgtttggtaaggaggcgtgaagatgacgactcaacaaagcgttcaagcgtctccgataagcgtgcgtgccaatgccgaacgtgaacggcggaaggcggcactgcggcgtcagcatctgttctatctggcgctgctcggcgtagcgctggtggcgccgatgatggtctatccggtgttcctgatgaagctgctgtgcttcgcgttgttcgcctgtgcgttcaacctgctgctgggttacgcggggctattgtcgttcggccatgccgcgttcttcgcctgtggtggctacatcacaggttatatgttgagcacctacagcggattgagcaccgagttgggcattctcgccggtacgctggcctccaccgtgctgggcctggtgttcggcctgctggcgatccggcgtcagggcatctatttcgcgatgatcaccctggcgctggcacaaatgatgttcttcgttttcgtccaggcgccgtttaccggcggcgagaacggcctgcagggcgtcccgcgcggttacttgctggggctgttcgacatgcagaacaacctgtccctgtactacttcgtgctggcggtgttcgtgctcggtttcgtcatcatccagcgcaccatccattcgccctacgggcaggttctcaaggcgatccgcgagaacgagccgcgggcgatttcgctgggttacaacgtcgatgcgcacaagctgctggccttcgtcatctccgccgcgctgaccggcctggcgggttcgaccaagaccgtggtgtttcagctcgcgtcgctgaccgatgctcactggcacatgtccggtgaagtgatcctcatgacgctgctcggcggagtgggcaccatcctcggcccgatcgtgggcgcgacggtggtggtcacgctgcaaagctcactgtccaacggtccgctgggcgagtgggtgcatgtgattctcggcgtgatcttcgtggcctgcgtactgctgttccgcgcagggatcgttggctgggtcgagcggctgatcaaacggaacttcaagtagaaggtgagggcggcggagaccggcggcgcccgggctcccggaccggtcgctccagcagtgctcgccaatgattgaagagttgccccggggcggaactacctgagcagcccagtgggctgcattcgctgcggggacgcggctcccaccaaagcgggccggtgtgattccgcaagctgcgatgagcgtgtgtgcggaaaggatcggacaccgaagtcggcgtggtgccgcctgtcacgtgcagcaggtcaggacgaattgtggaagccgccgggggcggaactacctgagcagcccagtgggctgcattcgctgcgggggcgcggctcctaccaaagcgggccggtgtgattcggcaacccgcggtgagcgcattcggcgaggtagggcaccgggatcgtcatggtgtcacaacgctacaggtgcagattagttgtgggagccccgccctcggggcgaagctgttcggcggtgagtagccctgctgtcgcgcagggccttgttgctcaggcgtttttccagctcggactgcgtttttccaggaaggcgttgacgccttctttctggtcctgcgtatcgaacagttcggcgaagagttcgcgttcggcagcccagccggacgtgtggtcgtcgttgcgcgcgttcatcaccaggcgtttgcagcggctgaccgaggaggggctttgcttgctggtgccttcggccagcttgagcgccgcctccagcgactgcccgcgcggaacgacttcttcgaccaggccgatcttctcggcgcgctgcgcatcgatgcgctcgccgcagaggatcatgcgcttggcccagccttcgcccaccagccacggcaggttttgcgtcccgccggcgcacggcaacaggccgacgctggcttcgggcagcgccatttgcgcttgctcttcggcgatacggatgtcgcaggccagcgcgcattccagcccaccgcccatggcatagccattgatggcggcgatggacacaccgcgaaagcgcgtcagcgcatcgaaggcgcggccgaagagggcggcgacttcgctggccgatgccttgtcgccgtctgcgaactgcttgaggtcggcgcctgcggagaagaacttctcgccttgcccggtgatgaccagcgcatagacttcagggtcttcgttgagctgaccgatcaactgctccagggcagccagcgactcgcggtcccaggtgttggcaggtggattggcaatggtcagcagggccgtgtggccgcgcatgtcgagctggatcttctggctcatgtcggttccttgttctgagtttgggacggatgccttgtagcgaaacgagattcgaagacgagcctagcagcggaaaaatagtaaacccatggtgcgaaatgcacaggtattctgtgtttttgcacagtaggcccgtggatggcctactgaaaaccgaaaggaactggagcttgcagtggactgggacaatctgcgttttttccttgaactcgcgcgtgccggcaagctgaccatcgccgcacggcggctggccgtcgatcacacaaccgtggcgcgtcgtgtgcaagcgctggagaaagccttggaccggcaactcttcatccgcgccaaagccggttatcggctttccgaggccgggcgcgaactgctcgcccaggccgaggccatggagagtgccatcgcctccatcgaacagccgagcctgaccgccgacaagctgtccggtcaggtgcgcatcggtgccaccgaaggctacggcaccctgatgctggccggccagttggctaatctgacccgtgactatccgcacctgggcgtggatctgctcgccgtgccgcgttcagtccgcctggcgcgccacgaggccgatatcgtcatcacgttggaacgccccgagcgcggtccgtacgtgatcaccaagctgaccgactatgtgctgcggctctacgcgtcggaagcctacctggccgcgcatccgcccatccgcagccgggaggacctggcgggccatgtattcgtcagctacatcgaggatctgctctacagcaaggagctgtatttcctcgatgaaattgtccgcccgcgccagcattcgctgcgcagcaccagcatcatggcgcagcaggaggcggtcgcggccggagccgggctggcgattctgccggcgttctctgcgcacaaggagcccttgctgaaggaagtgctggtcgacgagatcgagttcacccgtaccttctggatgctgatgccggtggaaaacaaggacctggcgcggatgcgggtgtgctgggatttcctgcgtgacgtggccgccaacacccatgacgtgatgatggggcgcgcatgaaccgcgaaggcaagggcacgatttccgtccagctggtggagcaggcgctgctggccttcatctcgccaacgctgccccccgaacagctgatgcgccacctggggctggcgccgatcgacctttgcgatcctgatggccggatcgatgtcgtcgagtacagcaaactgtggcggcgcctggcgcggcatttcgacgatgaattcttcggcatggacgctcggcgcatgcgcgtcggcagttttgccttcgtctgccgcgccgcaatggcgcaatcgacgctcggcagcgctttgcgggtagcgctggacttcttcgggctgaccttcgaaggctttcatggcgagctgaagcgcagcgagagcctggcggaggtgacgcttgtggagaacgctgatgcagcgccactgcgtgccttcggttatttcacgttctggatgttgctgcatggcctggcgtgctggctggtcggcaggcgcattccgctgctggccgtcgagttgcgctgcgaacaaccggcctataccgacgattaccgggtgatgttctcgcgcaacctgcgcttttcccggccgagtacgcggatcatcttcgccgctgaggtgcttgacctaccggtacggcgcagcgagcaggaactgcacggattcctggcccaggcaccggccaatatcctggtccgctaccgcgatacgaccagccttgccagccgcatcaagtccctgttgcgcgaactgccggccgagcaatggccgaccagcgatcgcatggctcaatcgctgtgcgtatccccgtcgaccctgcgccggcgcctcgccgaagttgggcagccgtaccaggcgatcaaggatcagattcgccaggagatggccacgctgtggctggccgacgcctcgatcaccttcgccgaaatcgcggagcgtctggggtttgccgatgtgagctccttctacaaagcgttccgcaaatggaccgggaccaacccgggccagtaccgcgggctgattctgcgcggcgacgaagcgcatcaatcgtcggcctaaggtcaattcaccgagcctcgtcgtttagccgggggtcgctaccgcttctgtaggagccggctctgcctgcgaccggcgcccatgaccgagcccctgtggaggccgaacctaagggtcgcgggcagagcccactcctacagggggcaggcgatacgagcggcaggtggccgtacgggttggcttctacaaagtggtcagccatgaaacgcagcgcttttgtaggagctggctctgcctgcgaccggtgccgatcaccgagaccttgtggaggccgaacctaagggtcgcgggcagagcccactcctacaagagggtaggcgatacgagcggcaggtggccgtacgggtaggcttctacaaactggtcagccatgaaacgcagcgcttttgtaggagctggctctgcctgcgaccggtaccgataaccgagatcttgtggaggccgaacctgagggtcgcgggcagagcccactcctacaggcggcaggcgatacgagcggcaggtgcccgtacgggttggcttctacaaactggtcagccatgaaacgcagcgcttttgtaggagctggctctgcctgcgaccggtgccgataaccgagatcttgtggaggccgaacctgagggtcgcgggcagagcccactcctacaggggccaggcgatacgggcggcgggtggccgtacggattggcttctactaactggtcagccatgaaacgcagcgcttttgtaggagctggctctgcctgcgaccggtgccgataaccgagatcttgtggaggccgaacctacgggtcgcgggcagagcccactcctacaggcggcaggcgatacgagcggcaggtggccgtacgggttggcttctacaaactggtcagccatgaaacgcagcgcttttgtaggagctggctctgcctgcgaccggtgcccatgaccgaaaccaggtaggggctatgttggccaaaacagtcaccgcgattgcgtgcaacgaccattgccgacggctttgggtctgatgaagatgaaggcaaggtgatcaagcagcacgcggctgtctggtcccaactatcttcgcgaggtcgtgctgtgaacattcaagacaaggttttcctgattaccggcggcgcatccgggctgggcgcggcagctgccgaagcgctggtcgcggcgggcgcaaaagtcgttctggcggatatcaacgccgaattactgagcgaacgcagcgaagaactgggcgccaacgcccacgccgtggttaccaatgtgtgtgacgaggcggccgcgcaggcggcggtgaacgcggcggtcgagcagttcggcggcctgcacgggctggtcaactgcgccggcgtcgccagcggcgaaaagattctcggccgtcagggcccgcacgggctggcgagcttcagcaaggtgatcaatctcaacttgatcggcagcttcaacatgctgcgtctggccgccgaagccattgcccgtggcgaggccgacgcgcagggcaaccgcggcgtgatcatcaataccgcgtccatcgcggcctacgacgggcagatcggacaagccgcctatgcggcgtccaagggcggcgtggtcgccatgacgctgccggcagcgcgtgaactggcgcgccatggtatccgcgtcatgaccatcgcccccggcgtgttcgagacgccgatgatggccggtatgccgcaggaagtccgcgactcgctggctgctggtgtgccattcccgccacggttgggccgcgccagtgaatacgctgccctggtccgccatatcgtcgagaacgacatgctcaatggtgaagtgatccgcctcgacggcgccctgcgcatggctgcgaaataatcggagaagacagatgaacaacgatcccatcgtgatcctgggcagcgcccgcacccccatgggcggttttcagggtgatctgaaaagcctcagcgcgccggagttgggcgcagcggcgattcgcgcagcagtcgagcgtagcggcgtcgccgccgaacaagtgcaggaagcgctgatgggctgcgtgctaccagccggcctcggtcaggcgcctgcccgtcaggccgcgcttggtgcgggactgggcaaggcgaccgcgtcgaccaccctcaacaagatgtgcggctcgggcatgcaggcggtcatcctcgctcacgatgcgctgcgcgccggcagtgtcgacctgatcgtcgccggcggcatggaaagcatgtccaacgcgccttacctgctggaaaaagcccgcagtgtctatcgcatgggccatggcaaggtgctcgaccacatgttcctcgacggcctggaagacgcctatgacaagggccggttgatgggcaccttcgccgaagactgcgcgcagcaccacggcttcagccgtgaggagcaggacgcctatgcgctgacctcgctgcagcgtgcccgcgatgccatcgccagcggccgcttcgccagcgaaatcgttccgctcgagatcactcacggtcgcgagcagcggaccgttcgtgacgacgagcagccgcccaaggcgatgccggagaagattccgtcgctcaagcccgccttccgcgaaggtggcaccgttaccgccgccaactccagttcgatttccgatggtgccgcggcgctggtattgacgcggcgttcccacgccgagcagctcggggtgaaaccccaggccgtgatgcacggccacgcggtattcgccgacgcgcccaatctgttccccaccgcgcccatcggtgccattcacaagctgctcgagcgcaccggttggcgcctcgatgaagtggatctgttcgagatcaacgaagcctttgccgtggtaagcatggtcaccatgcgcgagcttgggctggatcacgccaaggtcaacgtcaatggtggcgcctgtgccctgggccatcccattggcgcgtccggcgcgaggatcctcgtcaccctgatcgccgcgctacgcgaccgcggcctgcgcaagggcatcgcggccatctgcatcggtggtggcgaagcgaccgccgtggccgtcgaactgctcgactgaggatttgccatgttgctcaacgaagaccaaaccagcatccgggacatggcccggcagttcgcccaggaacgcctcaagccgtttgccgccgattgggaccgtgaacatcgctacccagccgaggcgattgccgagatggctgaactcggctttttcggcatgctttgcccggagcagtggggcggcagcgagaccggctacatcgcctatgcgctggcactggaagaaatcgccgcgggtgatggcgcctgctcgaccatcatgagcgtgcacaactcggtcggttacgtgccgatcctgcgtttcggcaaggaagagcaaaagcagcgttacctgacgccgctcgccagtggcgcgcagatcggcgccttcgcgctcaccgagccgcatgccggctccgacgccagcagcctgcgcacccgcgcccggcgtgacggcgacagctatgtgctcaatggcgccaagcaattcattacttcaggccagcatgccggcacggtgatagtcttcgccgtgaccgacccggacgccggcaagcgcggcatcagcgcctttatcgtgcccaccgacacgcccggctaccaggtggtgcgcgtcgaggacaagctcggccagcatgcctcggacacctgccaactggcgttcgaagacatgcgcgtgcacgaatcccagcgccttggcgaggagggcgagggctaccgcatcgccctggccaatctggaaggcggccgcatcggcatcgccgcccaggcggtcggcatggcgcgagcagcgttcgaagcggctcgcgactatgctcgcgagcgagaggccttcggcaaggcgatcagcgaacaccaggccgttgccttccgcctggccgacatggcgacgcagatcgccgtggcccggcagatggtgttgcacgccgcggcgcttcgcgaggccggccagccggctttggtggaagcatccatggccaagctgttcgcctccgaaatggccgagaaggtctgctcggcggcgatccagacactgggtggttacggctacctcaaagacttcccggtggaacgcatctaccgcgacgtgcgcgtctgccagatctacgaaggcaccagcgacatccagcgattggtgattgcgcgcaatctgggcgagtgattgcccgagccgcatcaccgggcgaggcacttttgttcaatcgctgaatcggctgctctttgtaggagcaacctctggttgcgatctgggattccgggtggcggcggttcgcgggcagagcccgctcctacaggggcgaggtgcgcctgtttagccaatgaatcggcggctctttgtaggagcaacctctggttgcgatccggggttccgttcgcgggcagagcccgctcctacaggggcgaggtgcgcctgttcagccaatgaatcggcggctgttgtgggagcaacctctggttgcgatccggggttccgcgtggtggcggttcgcgggcagagcccgctcctacaggggcgaggtgcgcctgttcagccaatgaatcggttgctctttgtaggagcaacctctggttgcgaccccgggttccgcgtggctgcggttcgcgggcagagcccgctcctacaggggcgaggtgcgcctgtttagccaatgaatcggctgctttttgtaggagcaacctctggttgcgatccaggggttccgcgtggctgcggttcgcgggcagagcccgctcctacaggggcgaggtgcgcctgtttagccaatgaatcggcggctgttgtgggagcaacctctggttgcgatctgggttttcgcgtggcgcggttcgcgggcagagcccgctcctacaggggtcggacgctatgttcagtcgctgaataggctgctttgacaggagcaacctctggttgcgatccggggtttccgcgtggctgcgttcgcgggcagtgcccgctcctacaagagcgctcagctccagcggtcggcgttctgcgatgttcggatcgcccccggcgtacgtgaaaaccgcggtgccggagccgcatgcagggcgccgtcgatatcgcgatacacgccgcgtgcttgcatgtgcgggtgctgtgcggcttcttccagggtaagtaccggcgcgaagcaggcgtcggtgccttcgagcagggcgcaccattgagcttgggttcgtttggcgaacagcaccgcaagctgctcgctctgctccggccagagtttggggtccgtgcagccattaagcagggcatcgggcgcctcgatgcgctgcatcagctcggcaaaaaactgcggttccagtggcccgacggcgatgtcgcggccgtccgcacaggtgtagcagcggtaatgtggggcggcgcctgagagcaggttgcggtcgcgctccagcgagatggcgccgctgggcagcagcccggcgaagaaggtcatcatcgaggacacgccgtcgatgatggcggcatcgaccacttggccttggcctgatcgttcgcgctcccacagcgccgccatgatgccgaacgccagatacaacgagccgccgccgaagtcgccgaccaggttgagcggcgggattgccgggccttcacggccaccgattgcggccagtgcgccggtgatggccaggtagttgatgtcgtgtccggcgctttgggccaatggcccggtctggccccagccggtcatgcggccgtagaccagtcgcgggttgcgtgcgtgaacctgcgctggacccaggcccagccgctccatcacgcccgggcgcatgccttcgatgatgacatcggcgccgtcggcaagcgtcaggcactgctgacgacctgcatcggagcggatatccagcgtcagccgcttgcggcctcgatcagccaccggattgggccagccgtttccgccctcgcgctcgatgcggatcacctcggcgccgaggtcggccagcagcatcgcgcagtgcgggccgggcccgatgctggcgaattccagcacgcgcaggccgagcagagggccttggcgaggttgcgatttatccatcgatatcgagctcccgaggcatagcgcatcgattcaggcggatgatccgtttcacccggattgttattcgtaggatgggtgtaacccatcgagcggctggtggggccacttcagaccctggctgacaccggatggcggtcctgtctgatggtttcacccgtcctacgtgctgatgggtttcacccatcctacgaacgttgtttggtccgccgtgcagtcagctgtttgccgcgctaatggtcatctccagcaggtggtcgcggtagcggtcacgcaaggtcttcttatcgatcttgccggtggcggtcagggggacggcgtcgaagatcaccgcatcgggcatccaccatttgacgatctgcggttcgaggtaggcgaggaccgcttcggtgctgatttcggcgtcgtcatgcgattcgatgatgagaatcgggcgttcttcccatttctcgtggggcacgccgaccaccgcggcgatgcgcacgcctggacaggccaccgcgatattttcgatgtcgatggagctgatccactcaccgccagacttgatcacatccttgctgcggtcggtgatgcgcatgtagccgttgggatcgatggtggcgatgtcgccggtgtcgaaccagccatccttgtccagtgcgctggtgtcgctgcggaagtagcgctcgaccgtccaggggccgcgcaccagcagcgcgccggagctggcgccgtcgtggggcagttcattgcccgcttcgtcgacgatcttcagctcgatgccaaactgcagacggccctggcgggtccagatggcctctttggtggccgcttcgcccatcgctgcgagcttgggtgttggtgtggcgaccacgccgagcgggctggtctcggtcatgccccagagctggcggacgctgacgccatagcgggtctcgaatttctcggccagcgcgcgcggcaccgccgagccggcgatcaccaggcacttgagctggccggtgtcctcgccggtgcgctccagataattgaggtacatggtccaaatggtcggcacgcccccggagaaggtcacgccctcggtctggatgagttcctgcaggctggcgccgtccatcttgtcgcatggcaggacgaacttgcagccgttgatcgctgcggtaaagggcacgccccaggcggtggcatggtaaagcgaggagcagggcataatgcagtcgaatgcagagaagccgaaagcgccggtgagacccgcagccatggcatgcagcacgacggagcgatggctatacaccacgcccttcggattgcccgtggtgcctgaggtgtagcagagcatggcgccggcgttctcgtcgaaccgcggccagtcggtgattggctgctccctggcgatcagggtttcgtagctctgcgcgccgatctcgcccggctcggtgcgttgcgcatccgacagcatgatgaaggtgtggatgtgctccagccgtggccgaactcgttcgacaacggagagaaagctgcgatcgaacagcaacacgccgctaccggcgtggttcagggtgtagatgatctgttcgtccgacagacgcgggttggcggtgtgcagcacggcaccgatgcccggtacggcgaagaacagctcgaagtgacgatgcgtattccaggccatggacgagaccaggtcgccgggtttgacgccaaggctttgcaacatcgcggcggcctggccggcgcgcctcgccaggcctgcatagtcgtaacgccagatgggctcgtcgaccagtcgcgaaacgatttcccggtcgccgtgggcgagggcggcgtgggtcaggatgccgctgatcatcagcggggtctgctgcatcgtacctttgagcatcttcgtatcctttttattgttctctgggtggcgcctgccaggccgccatctgccattcggaatactgcttgcggttgtcgtcgtgcgagaggtccgtgcctaccggtcgtcaatacctccgcattgtttccctttcagcaccaagcccgcctcatcacagcccgtaattgttcagctcgcgcgcgatcagcagccgctggatctcgctggagccttcgtagatctgggtgatacgcgcatcgcggtagtagcgctcgaccggatagtcctccagataaccgtagccgccgtagatctgcatggccttggaacagacgtactcggcgacctccgaggcgaacagcttggcctgggaggcttcggacaggcacggcagattggcgctgcgcaggcgcgcggcatgcaggatcagcaggcgcgcggcgttcaggcgggtgtgcatgtcggcgagcatgttggccacgctctggtgctcgatgatcggcttgtcgaactggatgcgctcgcgggcataacccagcgctgcctcgaacgccgcgcgggcgatgcccagggcctgagcgccgatgccgatgcggccgccttcgagattcgacagggcgattgccaggcccttgccacgcgggccgagcaggttggcttccgggatgcggcagtcgcgaagggtcacgccacaggtgtccgaggcacggatccccatcttgctttccatgcggtcgacgacgaaaccggggttgtcggtgggcaccaggaacgccgacaggcccttcttgccgagatcaggatcggtgaccgcgaagacgatggcgatcttcgcgcgcttgccattgctgacgaactgcttagcgccgttgatcacccattcgccgttttccagcacggcgcgggtgcgcaggttgtgcgcttccgagccggcttggggttcggtgagggcgaaacagccgatggcccggcccgtagccaggtccggcagccattggtcctgctgttccggtgtgccgaatttcaggatggggccgcagccgaccgagctgtggatgctcatcagcgcgccgatggcgccatcgccggccgagatttcttcgaccgccagcgcgtaggcgacgtagtcgatgtaggtgccgccccattgctcgggcacgatcatgcccagcagtccgagctcgcccagttgcgtcacggtgtcgtcgccgatccagccggcctgttcccaggcctgggccttgggcgcgatttcggcgcgggcgaagtcgcgcgccatatcgcggatcatccgctgctcttcgctcagttcgatgtcttgcatggatggctcctctcagacgcccgcgaagaaatcggcaacccgctgcggcgtgacttcagtcagcgtaggcggattccagcgcggactcttgtccttgtcgacgatcagcgcgcgaacgccttcgatgatgtcgccgtgatcgaaccattggcggtccaggtgcagctccatgcgaaagcattcggccagcgacagcgtgcgtccgcgacggagcatctccagcgtgacgctgagcgacaggggcgaacggctgtcgatgaccttgagcgtttcggcggcccagtcgcgatactcggggcggttttcctcggcgagtgactggcgaatgccggcaatgctgtcgtgggcgaaatgcttttcgatggcagggaagagcgccttgaatgatgcgtccggcagctcggaacagcccatggacctgaccatattcgtcagtgtcgcctgggccggcgagcgccagtcttgttgatccaggcgttgttccagctcagcgaaccgctcgtagggcacagagtaatcggccaggccggcatacaacgcatcggccgaacccacatgattgccggtcacgcccatgtagatgccgagattgcccggcagacgcggcagaaaataactgccgccgacatctggaaaatagccgatgcccacttcaggcatgcccatgcgcgtgcgttcggaaatcacccgcagcgaggcgccttggaccagccccatgccaccgccgagcacaaatccgttcatcagtgccagcagcggtttgctgtaggcgtggatgtactggtcgagggcgtattcctcctcgaagaaggcgcggtgaaggtcctcgccgttctggtagctgtcgtacagcgagcggatgtcaccgccggcgcagaaggctttctcgcctgcggcgcgaagtaccacggcgaccacgtcctgatcgtccgcccaatcctgcagctgacgatgaaggctgcgcaccatcggcagcgtcacggcgttcagtcccgccggacggttgagggtgaggtagccgacgcggttgcggacctcgatcagtaccggcgcttctgcctgggtcatgctcaatgctcctgacggtagagtttgatgatcgcggagaagtccagcgtaccgttgccctgcatgctgaaggcctggtacagctgctgcgcgagaccgccgaggataaccggctggcgtacctgtttggccgcttcgctggcgagccccaggtccttgagcatcagatcggtgccgaagccgccgctgtagtcgcgtgaggccgggctgttttccactacccctggaaaggggttgtagatctcggaactccagcagcgaccgctggacgagttgatcaccccggccaggaccttggggtccattcccagcgcgacgcccagggacatcgcttcggcggcgccgatcatggagatgccgagcaacaggttgttggcgaccttggccacttggccgttgccgctgccaccacagtggacgatgttcttgcccattgtcgcgaggatcggctgagccttctgaaagtctgcgtcgctgcctccgaccatgaaggtcagggtgccggctgccgcgccgacggtgccgccggagacgggggcgtcgagcatcggattgcctttttccgctgcagcggcggcgacttcgcgtgcgctcatcgggtcgatcgtcgatgagtcgatcagcagtacgccggcgggcacgtgggcgagcaggccgtcctcgccgagatagacctgcttcacgtgagtggctgccggcaacatcgtgatgatcacttccacaccggcctgggcgacgccagcgggcgaggtggcttccttcgcgccggcttccaccaggttggagaccgccgccgcggaaaggtcgtagacacagacttgatggccggccttgagcaggttatgggccatgggcccgcccatgttgccgagtccgagaaaaccgatatgcatggccgtttcctttttcttattgggggcgtttggcggcgccgcgacctatgccacgacgcccgccgcggttatttcaggttgatggtggtgttgaccgatccgccgacttcgttctcgtcgaaccagcgctgggtgacggtcttggtctgggtgtagaactgcaccacctgcttgccatacgggccgaggtcgccgagcttggaggcgcgcgagccggtgaaggagaacatcggcaccggtaccggaatcggcacgttgatgcccacctgaccgacatcgatctcttcctggaagtgtcgcgctgccgcgccggaacgggtgaagaccgccgtgccgttaccgttggggttggcgttgatcagttcgatggcctggtcgagggtgtcgacctgcatcacgcagagcacggggccgaagatttcctcacggtagatgctcatctcgggcgtcactccggagaaaatcgtcggcgcaacgaaattgcccttctcgtagccggccacttgcgggttgcggccgtccagcaccagttcggcgccttccgagacgccgcgctcgatcagtgaaccgatgcgatccagcgcagcacaggagactaccgggccgacgtcggtgccgctttctgcgccggcattgacctttagtgtcttggccttggcgaccaggtccggcagccagctttgcgcttcgcccaccaggatcagcaccgatagcgccatgcagcgctgacccgccgcgccgaaggccgcgccggcgatggcgttgagtgtctgttccttgtgcgcgtcgggcaggatgatgccgtggttcttcgcgcccatcatgcattgcacgcgcttgccggcctggctggcgcggttgtagacgtgggtgccgaccttggtcgagccgacgaaggaaacggccttgatgtccgggtgatcgcagatcatgttcaccgcatcggcgccaccatggatgacgttgagcacgcctgggggtacgccggcttccagcgccagttcggcgaggcgcatggtcaccatcgggtcctgttcggacggcttgaggacgaaggtattgccggtggcgatggccatcgggaacatccacagtgggatcatcgccgggaagttgaacggggtgatcccggcacaaacgcccagtggctgcagcagggtgtaggtatcgacgccgttggcgacattgttggccagctcaccgagttgcaggttgccaatgccggcggcgtgctcgaccacttccagcccgcggaacacgtcgccttcggcgtccggtagcgtcttgccctgttcggcggtgaggatggccgccagctccttcatgttttcacgtatcagctgctggtacttgaggaagatccgcgagcgcgcgccaattggcgtcttgcgccaggtcttgaaggcttccttggcgctggcaacggctgcattcatttccgcttcggtagcgaaaggcacacgggccaggacttcctgagacgcagggttgataatgtcgcgccactcggtggcagacgactcgaccagctcaccgccgatcaggagcttgactgtggggatggcacttgactgggtcatggtgggtcctagcgattgttgttattgaataaagcggatcacgtccccctgatcctagggtgcagatttgtttacatcaatgcgggttaccgcatagtggttctgcacaaatgcacagtcatcaagcgtagagcgaatgtgccgaatgcgtcgggcgagcccacgcctgcgccggttttccccgctgcaaggtcgatgaagcgagagccaatagtgagtttgagatagatacagatgttgagcacagatagccccggtaaccctgtcgtcgcgcctttcgagcatccgttgccattcgaggaacacatgctggacctgctgccgatcggcgtctgcacgctcgatgccgacggtgcggtgcagcggtacaaccgagtcgccagccagctgtgtggcgatggtctgcggctgtacgggcggctgcgcatcctttgcccggacaagacgctgatgccctttgccgatacgcccttggcggagaccatacgtacaggccatcccgggcaggacatcgccttgctgatcgaacggcccgacgatgaggcggcgccggtgctggccaatatccaggccttgcgcagcgataccgggcaaatcacgggcgccgtcgtctgctttcagggcaacacgccggcccgccaaggcgatgccgatcgccgccgcagtgtcgaatggctgacggcgatcgtggaaaacacccccgagtgcgtgaagatcgtcgaccaggatggcacgctggtgcaaatgaacccggcaggcctgcgcatggttggggccgagaccgccgccgatgtggaggggcaatgcgtgtacgacctgatcgccccggaacatcgcgcgtattggcgcgaccagcatcgacgtgtctgcaacggtgaaaagctcagctgggaattcgacatcatcagcctgggtggcacgcgccggcacatggaaacccatgccgtgccgctggcgttgcccgacgcccagtcgggcgcatcgcccggcttcacgcaactggcagtgacgcgagatatcaccgaccgcaagcgtctggaagccgccaatcaggaagccgagcggcgcctgcgcgagctgcttgatgccttgccaaccgcggtctataccactgacgccaacggcaaggtggccttcttcaaccaggcctgcgccgacctggcggggcgcaccccggccatcggtaccgatgaatggtgcgtgacctggcggctgtactggccggacggcactccattacctcacgatgcttgccccatggccgttgcgctgaaggaacaacgtcccattcacggggccgaggcggtggccgagcggccagacggcacccgtgtgccgtttctcgcctatcccgcgccattgcgtaacaaagccggcaccgtgatcggcgcggtgaacatgctggtcgacatcaccgagcgaaaggtggccgaggatcatcgccagctcctgctcaacgaactcaatcaccgcgtcaagaacacgctggcgaccgtgcaatcgatcgctgcgcagagcttccgtcatgacgatgtcagcgaaggctatcgctggttcgaaggccgcttgatcgcgctgtccaaggcgcatgacgtactgtcgcgggaaaactgggaggccgcgaacctgaacgacatcgtcgatcagtcggcggcaccctttcaggcccacgaccacaaacgcttcatcgtgacaggcccgtcacaacgtctgcgacccaaggcggcattggcgctggcgatggcgctgcatgagctgtgcaccaacgcggccaaatacggggcgctgagcagtgaggcggggtgcgtccgcctgcaatggcaaatcgtggcctgcaagacggggcgctgcctgcatctgcattggaaagaggtcggagggcctgccgtgtcgtccccggtacgcaaggggttcgggtcgcgcctgctcgagcgtgggctcgcgggtgagcttggtgccgatgtgcaattggcctacccggtcgaaggggtggaatgccatatcgaggtgccgctgccatgactgacgatcccgataccgctcaagatcccttcgggcacctgcgggtgctggtcgtggaggacgaggcgttggtcggtatgctgctcgaggacatgctgatcgatatcggttgtgcgcacgtcgagctgctttcgcgatttgccgacggcctgcaagcggcagagaccggcaacttcgatctggcggtactcgacgtcaacctcgacggcgtacccagctttcccatcgccgagcagctcatggcgcgtaatattccgctgctgtttgcgaccggttatggcgccggaggaatggacgcgcgtttctccgacattcccaccttgcagaagccgtttttcttcagcgacctggagcgaggcgtctggctggcgctggaagggtcttgagtcgcaacaactcgcgtcgcggtaggcgcccgcaacagaaagcccgcgtttcagcgggcttgtcgaggttgggccgggtggtaacgcctcacgggccctgggtaacgagcgccgagttgcccgttccgttctgcatgatcacagcgttgtagctctgcgcgctttccagcgtgcctgtctgcacgacggaggcgtagttctcggtgccggtctgtccgatgttggcagagctgtaatagcccgactggtccacgtcgatttcgttggcggttccgttctgatcgatgattaggctgctgccgtcgaagtcctggcggatatccacccggttgtaatcgcccgtggagcttccctctacactcgtcgagcgcccgccttgctgtgcggtcagctcgttgccggtgccgttctgagtgtaggaaaacgagccgaagccggcagactccacgacgtccgcgacgttgtccgtaccgatctggatcagctcgacatctcccgaggagtagcggccgggtgaacgctggtcgagcgttgcctggttagccgtacccgtctggctgatcgatgcattggcgccaaaggggaatccatcctgagtaagggtgatgatgttgtccgtaccggtctgatcggtctgcgcatgagcatcgcctatttgttcgatataggcggtgttgccagtgccgttctgcacgccgttgtagttcttgacgaggaatccttcctgaaacacctcgattgcgttgttctctccgttctggctgattgccgcgctgtttgcgttgaagtccggctgttcgatgtaagccaggttgctggtacccacctgcgagatggacgccgaatggccgacttctgccgaagactgcagcacggtggcgaggttgtacgcaccgtcctgactgacggtgattacgccatttgagcctgtttgctcgagggtggagatgttgccgtcgccggtctggtcgctgttggcggtaaggccgactccgttctggtcggtgtaggcgacgtttcctgtgccgttctgcaattgcgcgatgctgttgccgtcgccttgctgcatcacatcggcgtagttgtcggtgcctgtctgctcctgcctcgattcgctgacggcgtgggcgtggctcgcgatgaatagtgaaatggtcgctgccaggattgtttttcttgtgtgcattgcagaaccccttggtgaaagagcccgagttctagccggtgcgtctgtcgcggggaatccatcgaacagtcgatgtggcgcgagcggggtattaatgccccggagattgagcgctgggtcacgctgggctgcccgctgaggccgatgctagacggccgagaaagcgcgccgtggccctgatccgcaggtcacggcgtgcattcggtctttccagcgctagccgaccagcagcagcgtttcctggcggctgcggcgccgttgatacatcgtggcgactgccaccagcgcggccagtacgccgccaaggatcagcgacgagccaacagtgccgaatcccagcccgccttgtgccggcgctttggtcagcacatcgcccagcgtcgcgccgaaggggcgggtcaggacgaacgcggcccagaacaacagcaccggcgatagccgtgtgcgagcgtgcagcaaagcgataccggcaatcaggctgccgatcagcagcgcgccgccggcgaagcccaggccggagtcatcggccagatagtcgcccagcgccgtacccagggtgttggacacgaggatcgccgcccagtagaaggattcgccgcgcaggttgcgaatgcgctcgaccgccaacgtgccgcagctcagacgccatacgaggaagatcaccagcagcagcccgatcagcaaggccgaaccactggcataaccgaggcccagcgtgcgatccatgaagtccgacatggtggtgcccgcggtgctggtggtcaggatgaccgcccaatacaacggcgggttgtaccgctgggtccgcagttgggccagcagcgtgacgagaaaggcgctgaacagaatcagcgagctcacggcgtagcccacatcaagggtcatcgacaacaggtcgccggccgtttcgccgagggttgtggcgcagattttcatgacccagaacgcaagggtgatttgaggaagtttgttcatcgtctgatctcgaggggcacagcctgggggagcgcagcgggagacgccgcgtgatgccacgatgcacagcgcggtgtgaaggcgaggtgaaaaaagcatcaacgatgcgtagcggcgcagaggggcggaggcaccgggctggccattcatttatctgcgagccacgtcgctcccaagaaagctggcagtgcagcattgcaggctgcggctaacccgtgggagcggtcttgaccgcgaatggattccgtccgccacccgccgccagagagcaccgtgccgggtgtgtcgaggcggtgcgttccgccggactggccagcccaatggtcgggactcttgtgcgaaagcaggtcggatcgagggcgcgccacgggctgacggctgaacagtggcgcgcgagcgttgccgtacagcttgaaaagcgctcgaaatttttcgctggtcgatcgaccatagctcaccgataccaccgcagcgcttctacgggcgctgccatcgagaagaggaacaacatgaacagcaaggtcgttttcattactggcgccacgtccgggttcggacgtgccacggctcaccgattcgccgaggcaggctggtcgctggtgctcactggccggcgctcggagcgcctggacgcgttgcagaaggaactcagcgccaaggtgccggttcatgtcgcgacgctggacgtgcgcaagaacgaggcggtcaaggaggtggtcgccgcattgccggaagcctttcgagcggtgacttgcctggtcaataacgccggcctggcgctggctccagagccggcccagaagactgacctgaatgactggcacaccatgatcgataccaacatcaccggcttggtcaacgtcacccatgcgctgttgccgacgctgatcgaaacgggcaagggcgccagtatcgtcaacatcggctcagttgcgggccagtggccttatcccggtagtcatgtctacggggcaagcaaggcattcgttcagcagttcagctacaacctgcgctgcgacctgatcgccaccggcgtccgggtcacggatatcgcacccggcatggccgaaaccgaattcaccctggtacgcaccaagggcaaccaggccgcatccgacgcgctctacagcaccacgacgccgctgacggccgaggatattgccgaacagatcttctacgtggccacgctaccggcgcacatcaacattaaccggctggagatcatgccatcgcgtcaagcgtgggcgggtttcgcggtcgatcgcgacaagtgaacctgcacggggttggacgataaaagcgctggaaagctggaaagctggaaagctggaggctggaggaaaaggcgtcttcgttcggcctctagcttttgtgtcggcgggcgccgttctgtaaggccggggcgttgttcaggatggaaagcggtgacgtagacgctcggagtggcgctgaggccgctgaatggcgcgagggagcgggtgaggaacgttgcgggagggggttgctgtaacggccgatccgggcaggcgctgcgttcgcgaggaacgtcagcggcccggaacctggcagcggggtgtcagttcactgcgtctttcagcgacttgcccggcttgaagcctggcagcttggctgcggaaatcttgatggtggcaccggtctgcgggttgcggccgtcacgagcggcgcgttccttgacggcaaaggtaccgaagccgaccagcgttacgctgtcgccgttctgcagggtgttggttacgctttcggtgaaggcatccaatacgcgagtggcagtgcttttcggaacatcggcggaggcggcgatcgcttcaatcaactcggctttattcacgggtatggctccagattgggaagggtggtcagtataagcagcgtctcgctccgtcgcctgcggcaaatttcccctttttgcaaaaaatttatcccgcctggccgacaaatcgcttgtttggctgatccggacgcttctgtctggacagcgtcttgccggcttcggttcattggcctcccgaccatcggccgcccgccgatcgccctctacggcgctgttgcggcccctgcaaggggatgatctggttcgctgtacgctccggtgaacatggatcggcaggggataagccgtgaattcctcgccatcgcgccagcaatcggccgggggcgataccactagtagcgaatgtcgatttccacgttggtcggcgcagtaccgctaaccgtaaattcgctgtcctcgaacgctggtggccccattatcttggggttgttggacaggccatagccttcggtgggaaacatgccgaagcggcgatcaagctcaccgttgccgttttcgtcgtggtaggccatgacagcgtactggccggcgggtacgtcatcgaacaccagcgtgatggttcccgctgcggcgggtacctcgcgcgtggcgaaggccttgtctaccttgcggaaggtcttcggatcggaaaacagcgcgacccggacagctccatggtcgtgctggacgccgttgagcctgatcgtcagcgactgcccgtcagcaaaggccgccccgctggccgaaacggcgaacagcaataatagcgaacgtaacgtcatcgataagctccggtagggcaactgaatcattgggctggagcgatcgcgcagcggctccggcacgccatattggcgttgttgcagccgaacggctagcccagcgacgaacgccgaggatggttctcttcagttggcaatgcgatgctagccggccggcctttcgtatccgagcccacatggacaagatccacctgcagacgctgatcatcgacaagctgcaagccgacctgaggatcgccaaggacgcactcagggcttctcacgaagcggctacccatgccgagagcaaggcagagaacaaatacgacacgcgcgggctagaggcagcgtatctggccgatggccaacgccggcgggtcgcggaaatcgaggcggcactggcgagttatcgcaatctgccggtgcgcgacctgacaaatgagccgattcgcctgggtgccctggtttcgctcgaactgggggacagttgccgctgggtgttcctggggccggacgccgctggattgagcgtgacgatggggcaaaccgaggtgctggtcatctcaccgcacgcgccgctggggcgggccttgcttggctgccgggaaggcgacgagggcgagctgcgggtagagggccgaccgcagccatactgcgtgctgacgatctgttgatagccctccgcccgaggtgagggttggcttcgcgggaagcctggaagtccgctttcgccgcgggtcgcggctcccacaaaggcgacggggtgcactgctttttatttttgtgggaggcccgacctcggggcggagtttttccggcaccgagccggggccgttcgccgcggggcgcgcctcccacaatagcagcggcgtgcactgctttatttttttgtgggaggcccgacctcggggcgaagctttttcggcaccgagccggtccgttcgccgcgggtcgcggctcctacaatgggcggcgtgcaccgctttgttttttgtgggaggcccgacctcggggcgaagctttttcagacaccgagccggcccattcgccgcgggtcgcggctcccacaatagcggcggcgtgcactgctttgttttttgtgggaggcccgacctcgaggcgaagctttttccggcacctagccggcccgttcgccgcggggcgcgcctcccacaatgtcggcggcgtgcacggctttgttttttgtgggaggcccgacctcggggcgaagcttttccggcaccgagccgcgccgttcgccgcggggcgcgcctcccacaatgtcggcggcgtgcacggctttgttttttgtgggaagcccgacctcggggcgaagcttttccggcaccgagccggcccgttcgccgcgaggcgcggctcctacaatagcggcggcgtgcactgcttttgttttgtgggaggtccgcctcgtcgggcctcagccaatggtcatcaggctcgcgttgcccccggctgccgcggtgttgatgctaagtgcgcgctcgatcagcaaacgctccagtgggatatcggtgtcgccaggcgccatgccctgtatgccgacgataggcccgctgcggcgtgcaagctgctggctgacgtcacgcaactggtcggaattaccgtgatgaagcacgaaatcgaagcgcgcggtgtcgctggtccagtccgcgatgcgggtgatccgcttctgcacggcgggtggcagcttgtcgagcacagcgttgctcaccgctgattccgctaccatggcttcgctacccacgaccatcacggcggcaagctgggcctgtagatcgcgctcctcggcggccaggcacaacacatgttcgcgcggcagcaggctatagctgttgcgctcgccagtgggaccattcaatacccgcgtggtgccgccctgggattgctcggcgtagcgattgcacagcgccacgagatcgctctggccattgtcctgcgcccattgccgaaactgcctggcggcctcgatctgcgccggtgagcgatgcacctcgggcaacgccggtgcgccactgaaatccagggctcgcaacagcgcatcatgcggacgctcggccagcaggcgatacagatacagcggacctcccgccttgggtccggtgccggaaagcccctcgccgccaaacggctgcacgccgaccaccgcgccgacgatgttgcggttgacatagaggttgccgactttggcgcgttcgatgaccttggcgatggtctcgtcgatccgggtgtggacgccgagggtcaggccgtagccggcggcattgatctgatcgagcaactggtccagttcggtgcggcgatagcgcagcacgtgcaataccggaccgaagacctcctgttgcagctcatctaggcgctccaactcgatgagcgtcggtgtgacataggtgccgttcgagcaggcttgtttgtcgattcgggccagctgatggacccgacgccccttgtcgcgcatggcctgcaggtgccgttcgatattatctcgcgcctcggcatcgatgacaggtccgacgtcaatggccagccgctgcggattgcccatgcgtgcttcgcccatggcgcccatgagcatgtcgatgacccgctgcgcgacgtcttcctgcacgcatagcacgcgtaacgccgagcagcgctggccggcactgtcgaatgctgaattcatgacgtccagcaccacctgctctgccagtgcggaggagtcgacgatcattgcgttctgtccgcccgtttcggcaatcagcggaatgttgcggccgcgttcgtccagccgtccggcaatgctgcgctggagcagagaggccaccgccgtggagccggtgaacatcactccgcggatgcgctcgtccgctaccagccgcgcaccgacggtctcgccccggccgggcagcagttgcagcgcccccctgggaacgcccgcttcatgaaggatctgcacacccagggtggcgatcaacggcgtctgctcggcgggcttggccagtaccgtgttaccggcacccagcgctgcgcagacctggccggtgaagatcgccagcgggaagttccagggactgatgcagaccaccggccccaggggctggtggctgtcgttatcgaagttgctgcgcacttcggcgccgtagaaccgtaagaaatccaccgcttcgcggacttcggcaatcgcattgacgtacgacttgccggcttcgcgaatcagcacgccgatcaacgcttgcatgcgctgctccatcagcgttgcggcctgctcgagggcggccgcgcgagccgctggcgatgtcgaacgccaggcaccgaacgcgtcgaccgcgcaccgcagcgcgttatcgacgtcgccttcgctggcttcctgcacctcgccgaccacgtcccgatggtccgccgggttgagcaggggttcggtcggtgccgtcgagacggcctcgcagccgagcaagggtgtcgccacgtggcgctggtgcgcatcggccagcagggcggaggaaagcgaggccaggcgttgttcgttggaaagatcgatgccgcacgagttgagtcgtcgctctccgtagagatggcgtggtaatgggatgcgtggatgcggcaggcccagcgtgccttccgtggccagcatctgctcgacggtcgccaccggatcggccaccagcacctccagcgagatgctcttgtccgcgatgcggttgacgaacgaggtgttcgcgccgttttccagcagtcggcgtaccaggtaagccagcagggtttcgtggctgccgaccggcgcatagatgcggcacggacgatccagacgaccttcgcccttgccgaccacctgttcgtacaacggctcgcccatgccgtgcaggcactggaactcgtactggccggggtaatagttcgggcccgcgaggtgatacacggcggcaagggtatgggcgttgtgtgtggcgaactgcggatagatcgcctcgggcgccgcgagcagcttgcgggcgcaggcgatgaaggacacgtcggtgtaagccttgcgggtatagaccgggtagccttccagcccgttgacttgcgcaagcttgatttcgctgtcccagtaagcgcctttgaccagacggatcatcaaccgatggtggctgcgcttggccagatcgatcagaaattccaccacgtacgggcagcgcttctgataggcctggataacgaagccgatgccgttccagtcgttcagagagggctcgaagcagagccgctcgaggaggtccagtgacagctccagacggtccgcttcctcggcgtcgatgttgatgccgatgtcgtagcgtcgtgccagttgagtcaaggacagcaacgtcggatacagctcgtccatcacccggtcgtattgcgcacggctgtaacgcgggtgcagcgccgacagttttatggagatgcccggcccctcgtagatgccgcggccacgcgacgccttgccgatggcgtggatcgcctgctcgtaagacgccaggtaacgccgagcatcgctggcggtcagtgccgcttctccgagcatgtcgtaggaatagcggaagcccttggcttccatcgtctgcgcgttgtccagggcttcgtcgatggtttcgccggtgacgaattgttcgcccatcaagcgcatcgccatgtccacgcccttgcgaatcagtggctcgccgcctttgccgatcaagcggttgagggacgaggacaggctggattcgttatgcgtggccaccagccggccggtcagcatcaacccccaggtagccgcgttgacgaacaccgaccggctgttgcccaggtgtggctgccagttgccggtactgatcttgtcgcggatcagcgcatcacgggtgcccttgtccggcacccgcagcagggcttcggccaggcacatcagcgccacgccctcctgcgacgatagcgagaactcctgcagcaggccctgcaccagcccttggcgtcccgcggcgcttttctggttgcgcaatttctcggcgatgcgcagcgccagccgatgcgcgccttcggcctggtccggcgacagccgtgcctgctccagcagcatcggcagcgcctcttgttcagggcggcgataagcggcggtgatcgcggctcgtagtaccgactgcggcaacacactttcggccagctcgagaaatggctgagtgccgggttcgacttcggcttccagggcgtccgcgggcggcaaggggtgctcgctgagcggggcggtgccgcgttcgagttgctcgaggtaatgcagcagcgcctgctttatcaaccactggggcgtgcggtcgattcggcgtgctgccgcttcgagtcgatcacgggcagcctcgtcgagcttgatgccgagtgtggtggtcgccatgttgcctacccctcaatctgtgatgtgcgggtgcgggagccgtaccgtcgcggtacggcttatacgatcgacagccttctatcagcgtagacgttcccggtgcggtggtcggcgcgcgctggcgggcggtaagacactgatacagcttcagcggcacctcggcagccaaccgggcaagtcgtgactagtcttgaatcatggctcgcgtaatgcgattcacagacccatcgggtgagcctcatacgccgagcttgcccagggccgcccgcatccggctccgttgcgatcggccctatggagggaatatgaagatcgagcgattcgaggacctcatcgactggactcgggatacccatcgggaactggccaggtgcctgggccgcagtgcgctgcgccacgaagagcagcgcgcacagtggttgctggcctatctcgccgatcatgagaaagccctggccaacaccatcgagcgcgttgagcatcacgccgacccgaaagccctgcacacttggatctacgattatgtggcgcgtaatccggtgattcgcggccagccttgcgccaagccgtacgcgaccatgagtctcgaggagatctcccgcgagctgttcaccatccataaccaggtgatggatctgtaccggtcgctggcgcgtcgagccgaaatcgacggcgcacgcgatctcgccacggacctgctggcgttggagtcgcacgaaacgatgcgactggcgatgcagttcaatcgggtcaacgaggtctgagccggcggctgataacgacgtgctgtatcggattttggccgatttcagcgcttttccggttccggcacgtcggtttccttgacctgcttttcatcgatcttgcgttgcgcctcgcgctcgtccgcggcgtcaggttgcaggctttgctgttccggcgcggggtcgtactgaagctcgaccatcacggggaaatgatccgatccgaacgcgggtaaacgctggatgcgcaccagctggaagtggtgactgtggaagagatggtcgagcggccagcgcaggaaccagtgctgcgcatggaaactgttgaccatgcaacgacccacacgcggatcaagcaatccgctgaccttgcgaaacaggcgcgtattggctgaccaggcaacgtcgttgaggtccccggtcacgatgatcggcgtgtcgggctcgtcgtcctgaacgctcttggccaccagtaacagttcggtgtcgcgttcggtggactcttcgttctcggtggggctgggcggcgctggatgcagaaaatgcatgcgtatcgccagctgctcgttcaggcgaacccgcgcatgcatcgagggcacgtcatcctcgacgagaaagcaggtttcggcgttttccagcggtagccgcgaccagacgtgcatgccgtagaggttgtccagtggacagcgcatcacgtgtggcaactcatcggtaagctcttcgagctgcgcttcccaccagcgatcggtttcaagtgtgaccagcacatcgggacggtactggcgtaccagcgccttgagcgtgtcggcctgtcggttcggtgtaagcacgttggccgccatcacccggatgcgcggcctgtcgcggcgcgagtcggcggacttgacctcgcgaggccacagccgggtatagggggcgatccaccaggcctgataggccaggcaaccgcctgcgagtacggaaaccaggatttgcagcggctcggagtaggacagtagcgacgcctgggccagcagcaacacgaaggccagcacacacagctgcaagcgtggaaaatccagcgcgcggacccaccaggccggatttttccagagcggcagcaaggtcaacaccaccagcagaccggtcgctgtcagcaagatccatttcgtcattcccactcctcggtgtgttcggctcgagacactgccggctgttgcgacctgtcatcaggcacaaggcattcgtcccgctgcctcccgtttggttccgctcgtcgccggccagccatatgcacgcgcaggcaacggcagcatgcggaaacgaaaaaggcctgacaggcagtgcctgtcaggcctcttcggatcgcagcgggtgacgttacatcggttcgccaatggccgcacagctgttcggcgccgtcgcgtgttttctcagtaccggcaactggggctgttcggcaccgccggtcacgtcgagtgcaaggatgtagttgccccaccatggacccgcagcccaataggtgagcggaacgcagttgtctcgcagatagccgagcaggttatccatcgcaacgatcgcatcgggggcatagttcggcacgcccatctcgccgatgaaaccgcgcagcttgttggccctcagccagtcgacaaagggtttggcgcgattgatgcccaggtccggcgcgaaggtctccgtcttgtcttggtacaggcccgacgtatcacggtcgaggtacatgtgcgcttcgaaaatcagcttgttggccggatcacgcatccagggatcagcgatcagctgggtattggactgcggccagtgccaggcgctggagaaacgatcacccgccacgtaaatccagtgcgtctggtcgaccttgcggatttccttggcggcggccagggccgctgcgggccaaagccccttggtgttcggctcgttcatgaggccgtacccgctgagggcagggtgcttgccaaccttctgcgcgatgcgtttccaggcgttggcgaacgacggaatcgggacggtctcggagccgatcggttgcttgtagtagcgatagtagttgtgcatgtccagcacgaccttcacaccgtacttctgcgcgtagtcgagcgactgggtaagcagcgccagctgtgcggcatcgagctcggcgtcgagtcgaggctgcatgcgctcccagaggaacggcaggcgaaccagcgtgaggccttgcgcggcgtacttcttgtaatacgactcggccggatagatgtagttggtgccatgtttgccgggcagcaccgatgggccgaaggcggcgccggacagcgctacaccgacaagctgcaccggaccggctgccggcagcgtgacctccgtcgatcccgatggggcggccggccgaattgccggggcagtggcgaggctgagcttgttcggatagccaaccacattgccatcgagcacgggcccgctcatgaacacgctcagcgcaccactggccggcttcaccgaggtgatggtgcggatctgcccgtccgcggtgcgtaccgaggcacctggcacgaaggccgccttgttctgcgtggtcgcggcgaccgaaacgcctgccgaagcacgccaggaaccgttcaaccaataactgttggtgaacttgttgatcagcgccgaatacagctggggcacaaccggagtggtgcttggcaccgtgaccggcgtcgagctggcgacgttgcttatgctgagcctgttcgggtaaccgactagcttgccgtcgagcaccgggccgttcatgaaaatggtcagcccaccgctggccggcttcaccgaggtgatggtacggatctgcccgtcggcagtgcgcaccgaggcgccaggcacgaaggccgccttgttctgtgcggtcgcggcgaccgaaacacctgccgaagcacgccaggaaccgttcaaccaatagctgttggtgaatttgttgatcagcgccgaataggcaatcgtagatgtgctggtgctgccggtggttgcagcctgagccgcaccgatgccggggatgcagcccagcaacgcggcaagggcaacggcggacaagaggccgttgcgggtgttgacaaaagatgtgacggacattggctcaccatgaccattgggcatcgaacgcgtcttcggcgcgttcgatgaatcgacaggggaggttgatcaataagcggtgctgctaagcaggcggaatccaccgatagaacgaaccactaggcgaaacggctggctgggtaagtgccgtttcgttgcgcatttataatttgtttcttttatcttttgaatctatgcagacgtaatatcgccgccaatattacgtcgatcattatcgttgccatctttttgatatcaaatggccgatggccagtaaaaccggtttgttctcaaaggcccgtaccgcgcggccagcgggcgataatggcgtcagttttttgaattgaccgttaatcgggtcacgaaccagaacatattaaaaagcgacgaatggcatgcggggcgttgaacttatttgggatgtaactgagcgaggttcggcttgcggttacacgagtaaaacgtgctgaaaccgattgcgggttacaggcggggatgaggcggtgttgtgcttgtaaagcgccctggcttggtgcagggtcgaagaccggttcttgctgcggagtcctgccatgtcgcgtcttttccctcgcgtcgaccctgatgggctgatcgaatactcggtcgtctataccgatcgttccctcaaccacatgtcccgatccttccaggctgtgatgaacgacatctccagaacgctcaaggcggtctacaacgccgatgcggtagccgtcgtacccggcagcgggaccttcggtatggaggcggtcgcacgccaactagcgcatgaccgccattgcctggtgctacgcaacggctggttcagttatcgctggagccagatcttcgagatgggaggcatcccggcgcgcacgaccgttctcaaggcgcgaccgcaggctcagacgccgcaagcgccattcgcgccggcaccgctggacgaggtgatcgcagccatcgccaaacagaagcctgatctggtgtttgcgccgcacgtcgagacctcatcggggatgatcctgcctgacgagtatctgcgggcggtaggcgacgccgtacatgcggtcggcggtctgttcgtgctggactgcatcgcctccggcgcgctctgggtggacatgaaggcgacgggtgtcgacgtgctgatcagtgcgccacagaagggctggagcgcgtccccttgttgcgccttggtgatgctgagcgaggccgctcgggagcgagtggaaagcacccagagcagtagcttcgcgtgcgacctgaagaaatggctgcagatcatgcaggcctatgagcagggcggacacgcctaccacgcgacgctgcccagcgactcgttggcgctgtttcgtgacgtcatgctggaaacgcaggcgcgtggattcgaaaccgttcgcggtcagcagatcgagctcggtcggcgtgtccgcgcactcttggcggagcggggcttcaagagcgtagcggccgaaggtttcgaggcgcccggtgtggtggtgtgctacaccgaggatccggagatcaagaacggccacaagttcgccgcgcagggcctgcagatcgccgccggcgttccgctgcagtgcgacgagccagctgatttcccgaccttccgtatcggtttgttcggcctggagaaactgaacaatatcgatcgcacgcttgatgtgctgcgcgatgcactcgacgaaattaccggggcgaagtaacgcggtatcggtgcaattgccacggccattgcgaccgctcgtcgtgtggcctgtgcaagtaccgttgtcttttgcagtgcttgtttcatcgagttatatggccaaaccccgcgtgggcgctgtgtctgttgcgaaaataacgctgaaacctgcgagctagacacattcctgaaacaaaaatgtgtttgcagaagttgccaggctgactacgctcaagttgtacgaagcttattacaacaagagagaggggctaactatgatcaacaaccagaaagctcaggtcgttgcactcgagttatggcgcttctgcgctcactgcattgcagccatcgttgttgtaggagcggtattgattgggttcctcggatcatgggagctgggcctcaaggtcggtgtactgccattgctggcactgatcgccgctgacatgctggccaaacgccgggagcacgacattcagccaaggaattcctgaccacttttatcctgcgctaaccacaacggtcggcgcaggatcaacgctcggcatcgccgacgcgcaacatcaagcattctgcgtaacgaccgcttcggtcttgcgcctcgccatcagacttcacccaacgaagacgtacaacgccaggccggcagtgctcgcccgccgaagccgcgccgaaacggcttggtcatggatccgtggcgccggcagcttgggcttaccgaacttgagcgaggtagtcacggtagtagtcgagcgtcgccaggttcttgtccttggcttcgaacatgatgtcgaagcggtcgaggaattcacgggcgtacaggttggtccagcggttccacatgcgcttgctatgactgtagaggtcgcgcttgccgacctgctccagcagtgccggcatttccaatttgtcgtctgcggaaaagcccagctccatcaggcgttcgggtggctgcgagtagtgcatggtgggtcgcacaccgcgccagctgtcgatgatgcgcgaaaccctcgaatcgttggggtcgatgtagtcgtcttcgttgatccagcagtgatggatatccagcaccactggcgcgaggtcggcgagtcccaggcagtcatcgacgccgtaggtcttctcctcgttctcgaaggtaatgcagttgcgcgcttcctctgaaaggcgtggccagacagcccggatgccatcggcgcccagccgtccggcgatatgcacgttgcatttgaaatcctgaaagcgccgaccgaagcccatcatgcggatcatgtcggcgtggtattcgaactcggccaggctgttttccacgacctgcggcttgtccgaacccagcacgcaatattgccccgggtgcagcgagaggcggatgctcagcgtcctggcacgctccccgatctgcgcgaagccggactccagcacgctgcgcacctcggcctggtcgtaaaaggcctttgcttgcggatggctgtagaagggcagcaggtcactgctcagacgcagcatgcgcaagggctcgggcagggtcccgacatagtcgagcaaccgcagctgcgcggccagattgtgctcgatgatctcgttcagcttttcccgcgcggccgcctgcgacacgctgttgagccagcgcaaggtggtcgaacgcgggttgaatgcccgttcgatgctttccagcgtcttcagcgattcgctgtggaccgggtggcgatacaggcaggcgaaaccgattctgtacatagggaccttgggcgtgtggcgccatgacgtgtcctgtttagtggccataagcggggcagggtgccgcgcaactgacgaacgacgggcacggatgagcggccattcactggagcggccggctcgccgatgccgctgggcatcgccccggggtcctgtccagagggaaaacctcgtaccatggcgcgtctttttttgttgctctggttggttgttcatgttgtctgccgtcaagcgctacaagctgctggtatccagtgtattggcccgttgctttccacgcacttcggcctatgtacagtccgaagaggagctgattctgaggcgctggccggatggccgtaagccgtcatccggcaagcccggcaaggcgctggcgaagccggtcaagacggtgaagtcggtcaagaaggttaagtcggtcaaggcaccacaaggccggcaggcgacggcaaagccgcgagcacagacgcgcaaagccaaatcttccgctgacgacgggctctacggcccggcaaggatggccgtcgacacgcagcagatcgaggccatgcgcctgcgcgtggggcgcgcggtcgaggccggggtcgtgcgggcgccctcggatgaacagtggcgcatgatcctcgacgacagtccggtgacgcggatatttgccggggcgggatcgggcaagtcgaccacgttgatcctgcgggtggtgttcatgctctgccatctgaatgtaccgccggaacgcctgacggtgatttccttcaccaatgcttcctgcgccgagttgcgcgatcaattagtccgggtactgggcttctggaacgtcgacttcgatccggcccatgcacgccagtgtgtgcgcacctttcattcggcgatggcggcattggcgaagacgtcgctgggaaaaccgaaatggttcgagcagttggaccagaagggagcttcgccttccgagccggacaatccgctggcttccgcgcgcttgggggcggcgcagcaacgcttgctcaagcaggcgtaccaggcctgctacgacgagcaggaagactttcgggcgcgggttcatcagttgttgagcctgcccgcgccagaggcttgcgggcaggcaagacgcaccgcgccgaaagcaccgctggacgcgttcaagctggctggcgagttcgcatcggtgccgctgttcgaagccttctacgcgcaggcgggttttatcgaaagcatcggcattcgcatcgagcagatgcagatccagcgcctggagtgttcggagcgcgagcgatggttcgtcgaggcgctggtcctgttctggcggtattttcaggccactctgcaggcgcaggggttgatgaccttcaacggtgccttccagcgactcaccgagcagctggcagccggtagcccggacgtcaccaaggacgcgctggcgccgttcagccacctgttgatcgacgagtttcaggatatctcgccgcagatcgtccagtggctgcaagccctgcacggcgcactcgtgcgtcagggcgaaacggtgagcctgatggcgatcggggatgattggcaatcgatctacggttggcgcggcagctccccggaattgttcatggatttcgataaatacttccccggcaagggcgcctcgaagcagagcagggtgctgatgctggagaccaactatcgctccatcgaaccgatcattcgcgatggcgaggcggtgctcgagggcgtcgagttcaagcaggccaagaccagcaatgctgccaaggccgcccagcccggcgaccacggcgtgaagccggtgacgcgtttcgacgtcaaggcgggcctgccagcactgatcgccgaaatcgagacgcagtgtcggcatgttgcgactcgcccggatgcggatcgtaacgccgtgctgttgctcagccgtcgcaacgagccgttgcgcgccattcaggccgaactggacaagcgattgccggtcaaggcctgcaccatccaccgggccaaggggttgcaggccgaggtggcgatcatcgtcgacgattgcctgccggtggagaagcacccgcttcgcaatgccctgtatgcctactcgggattcttccgaaatggctacgatcaggccatggcagatgagaatttgcgcctggcttacgtggcgattacccgcggcgtgagccgggtgttctggtatacacagaaggcacagggcgccacacgcctgctctctgcgcgaaagaaaacgcgttgaacggcaggcagtgacgcgacaccgataatgctgcggcaaacgtgttgggcttgccgatgaaccactacgcacaaggggcgaatacatgctgaagctatgggggcgaatcaactcgaccaacgtgagaaaggcgctctggtgcctcgaagagctggaggtcccctatacccgtatcgatgcgggaggcgccttcggtgtggtgggcgaagcccagtacctggccaagaatccgaatcgtctggtgccttgcctagaggacggcgatctggtgctgtgggaatccaacgccatcgttcgctacctggttgcgcagtatggcgctggcacgctgtggggcgccgatccgcggcagcgtgccggcgcggacaaatggatggactgggtcacgtcgtccctggcaacgccattccggccgctgttctggaacatcgtgcgcaccgccgaggaccagcgcgacatggccgccgtacaatcggcgctggaggcttgcggcacgctgctcgccatcgccgatgaggccttggccaggcagccgtatctgtcgggtgaacgcttcggcatgggcgatattccactgggctgcttcgcctacgcctggttcgagatgcccatcgagcggcccgtactgccgcacctgcaagcctggtatgcgcgactgcaagcgcgtccggcctaccagcgcgccgtgatgacgccgctgacgtgatcggtctcagcgactggccgatgcctcgttcagccagtcgaagaaggccttgaccggcggatgccgctcacggccaggtacgcaaagcgccgtgtaattcgccccgggcacggtgatatcggggcgcaatggctgcaacagccccatcgccaggctctgcgaaaccagcacattgctcgccaggaccaagccttgcccggcaatggcggcctgcaacgcataatgctcctcgtcgtactcgcgcaattctgcgtgttccagccaggactcgccggctgcctcgcaccaggccttccagctgcgatcgtaaagctgtgagttgcgccacgcacggtgatcagagtcagtcgtgccgggtccagagcggcaaggagccccggcgcgccgtatacgccgaaacgttcgtcgagcaggcactggctgtgcaggctggggtggctgccgtaaccgtagcgaatcaccaggtcgatgctggcgtcctgctgcaggtcgagcagctcggtgctggtttcgacgcggaccttgatccccggatgcgcctgatagaaatgcccgagctgcgggatcagccacagcgccgcgaaggccggcgtggtggatagggtcaggctgccggtactgggttgcgggcgcagttgagcgacgctctgcacgatgtccagcaatgccccatgcagactggcgaacagccgctcgccgcattcggtgagccgaacgccacgggccaggcgttcaaacaacgccactcccagccaattttcgagcgtcctgatctggtgcgataccgccgtgggagtgaccgccagctcctcggccgcggccttgaagctttgcagtcgcgcagcggattcaaaggtgcgcaatgcggtgagcggaagattcgcgaacatggctatctcaggtgaattcagttcattcggctgcagtattgctcatttgtcgtcgttcgccttgcccaatagctttaggtgcgtcagccgcaagatgcggcgcaggaggtgagagatgaaaaaaattctagcggtacaaggcagcccgcgcggtgaacgttcccattcacgacgcttgctcgagcattttttgcaggcgctggcagccgagcaaggcgaggtcaggctttcgcggcgagaggtggggcgtatcgtcttgccaccggtcaccgaaggttgggtggcggctgcattcagcgcgccagccgaacgctcaccggcaatgcacgcggacctggcgctcagcgatgcgctggtcgacgagttgctcgaggcggatcgcctggtgattgcggcgcccatgtacaacttcggcgtacccagcggcgtgaaggcctggatcgaccagatcgtgcgcatcgggcgtaccttcgacttcacgccagaagacccggccagtcagtacaagccacgagtcctgggcaagcgcggcctgatcatcaccacacggggcgatcgcggctacggccagggcgggatcaatgcgcacctcaaccatgccgacacccatctgcgtgccgtgctcggcttgatcggcattaccgatgtcgaggtggtcgcggtggagaacgacgagttcggcgggttggccttcgaagattcctatcaggcggcgcggcagcggctggcacagctggcgttggatttctgatggccaacggctggatgttcctcatgctggcggccggcttcgaggtgcttttcgcgatggcgatgaaatacgccgaaggcttcactcggctgctacccagtgcattggtggtggtcgccgcgagcgcggggatctcttgcctgacgctggcgctgagggagcttccggtcagcatcgcctatccgatctggaccggtatcggcacgctgggcacggtactgctgggggccttgctgctgggcgaggcactgacgccggtgaagctgatgtcggtcgcgctgatcgtcgtcggtattgccggactcaggtagcgcgccggctgcggcgttgcgttcaaccgagtgcaacggggcggctgctcggccaggccgatcgaagggcttcaccgacgcccgaaggcctgctcgagcagcttcggcagttgctccccggccagtcctttcagtgcgtactcgcgctggcgatgagtgacttccggctgcgggttgacgtggacgacggtcgctccggcgcgccaggcctgcccgggaacttcggcagccgggtagaccatcccggatgtgccgacggagatcagcacatcgcagcgttcggccgcctcgaatgcggcggtcaaggcgctggccggcaggctttcgccaaaccagaccacgccagggcgaagcgctccgccgcatatcaggcagcgaggcggcgccaggcgacgtccgccttcgggttcgctcggtgcgtcgagcgaggcgtcgcccgcttggccgcagtcgaaacaccgcggttggtgcaggctgccgtgaagatggatcacctcgcgactgccggcgcgctcgtgcaggtcgtcgacgttctgcgtcaccagcgtcagccgaggcacatgccgagccagttcggcaatcgccaggtgtgccggattgggtttggcctgcaacactttcatgcggcgccattcgtaccagcccagaccagcgagggatcggcgcggaacgcctccgcagtggccagtgaagacgcatcgaaacgttcccagaggccggtcagcgcgtcgcgaaaggtcgggataccgctttccgccgaaacgcccgcaccggtgaataccacgacgtgttgcgcgctacgcagggtttcggcgagtggcgtgtgggtcatcggtgcctccgaggcggttactggctggctggacggatcgaacagcgccaatcaataccatccaccgccagcggatgccatcgctcgccgtgtcagtgacggatggctcggtagaggcgctgcctgtcgtgggttgccgaagattgtgctcagcgctgttcgcccagctgcctgaatgcggtcagcgcgcgctcgcggctcatcggcaggtcgacgatagggggcgagtagtcgacgtctgcgaacaggccattcagcttgtgcgggtcatgaatgtcgcgttcgcccagcgtcgcgagttccggtagccagcgtctgagaaagcggccgtcaggatcgaaccgggccgattggctcatggggttgaacagccggaagtacggaaccgagtcggtaccggtcgaggcgctccattgccagccgccattgttggccgccaggtccccgtcgatcaggtgctgcatgaaccatcgctcgccttcgcgccagtcgatcagcaagttcttgctcaagaacattgccgtcaccatgcgcaggcggttgtgcatccagccggtggccagtagctggcgcatcgccgcgtcgatgatcggaaagccggtgcggccttgttgccacgctgccaggtcgtccggtgcccggcgccagggcaggaactcggtttcgctgcgaaacgcacggcccatcgagacccgcgggtagccgacgagaatgtgcttgtagaactcgcgccagagcagctcgttgatccaggtgaccgcgccggggttgccgctgtccagctcgcctcggttggtgaccagcgcggcgtgcaggcattgccgtggcgaaagtacgccggccgccagatagggtgaaacctggctggtccccggctcggcaggcatatcgcgcagcgactggtaatccgccatgacattctcggcaaaggtgtgcaggcgccggtgtgcggccgcttcgccggctggccagtaggtttgcaggctttgatccggtgatgccaggccttccaccgaggtaggtacgggatcgctttccatcgccagccagcgctgtggtgcgggcgtcggcaggctgcgcggcagcgagtggctgagccgcgaatagcagaccttgcgaaactggctgaacaccttgaagcattcgccggccagggtcgtgatgctgcccggcgcgaagagcaactgatcgaggtggcgatggaacggcacagcatcctgccggagcgcttcggcgacggcctcgtcccggcgctgctcgtttacgccgtactcgtcgttggcatgcagggcgtcgatccgatgcgtccgacacagctcgaccatcaatgccggaacctcgcgccagtcatccagggtgcggatcagcaatggaacgttgagttcgctcagacgcgtcgacagctcggcgaggttgcgtagccagaaatcgatcttgcatggcgcatcgtcgtgggcgcgccactgccccggcgtgatcagatacagcgccagggtcgggccggcgttcatcgccgcggtcagtgccgtgttgtcggcgactcgcaggtcggtgcgtagccagtacagctggttcatcgaatagggccttgaggtttctcgaacgagggatttgcctgcagggcgtcgagcgcagcgagggcgtcggccgccagggtcaggccgtcaatgtcgcgcagttcggcttgatgaatgcttgccgtcggccccgccatcagcaggggcaaccgctgcgggtcgacgagccgaggcagctgtcgcctcaggtcgccactgtccatcgactggctgccgtagagcagcagcccgcatggattgagccgtgccaatgccaacggcagttcggccagtggaacgggccattcgatgatctcgaccggccaacccgcactggaaagcagccaggcgcagagccacagaccgggctcgaagcggcgatcgcccagcgctatcaagagcagcggcgcaccgttgtgctgtcgattgaagtggtacaggcggctcccgagcttggtccgcaaccaggtgttgaacagtccgcgctccagctcggcgccgaattgcccggcccagcgctgttcgaggctggtaagcaacggcaggagcaggtgctcgcagagcgtgcgcggcggataaagcgaaaatgcccggttgaagctgtcatcgagctgccgttcggccaactgagcggtcgcctgcagcatctgttcatgcaggtcacgccaggggttgtgttcggtcaggtcgacgatctggtggctgtccagcagttgcttgacctgactgaccgcgacaccgcggtcgagccagttgaggatgccgcggatgcgaagcacatggctgttgtcatagagccgatggcccttgggggtgcggcgcggcacgatcagcccatagcgccgttcccaagcccgtagcgtgaccggattgacacccgtaaggcgcgccacctcgcggatcgggaaccagccttccgggcccgtcgcgccgttatcttcatcggatgtgagggccatgtcagatgccgttccgcaggctgaggtcttccgggtggggctgcaggtagacctgcgtggccacgtagcggtcgggatggcggcggaagtgatgtttgagcaaggtcatcggcaccaccagcggcacgacgccttcgcggtactggtcgatcagccgttgcagctcctgcttgtcctgcgtaccgaggtcgcgcttcaggtagccgctcaagtgctgcagcacattggtatgggtgccgcgtgatgccgtcttctttagtgccgccatcagctggctgaagtagctcggtgcgaaggcttccagcggttgcttgccaaccgtggcgaccagcctgccgagcgccttgtattgcacggggtcggtcgccatcagctggtatttgtagcgcgagtggaattcgaccagtgccttgcgcgtcacgccactggccacaagccgctgccactcggcgtaagcgaagattcgggtcaggaagttttcccgcaacaccggatcattgaggcggccgtcctcctcgatgggtaggtccggccgtgcctgcatgagcgcgtgggcgaacaagccggaaccgccgccctcgatcggatgaccattggcctgatagaccttgacccgctccattccgcacgagggcgacttctgcatgaggacgaagccgcagatgtcgtgcagttcagtggcgacctgtcggccataggcgcttaacgcatcggtcacatccagctcggcgtgcacgctgcccaccgcgcgcggatggtccgggtcgccaacgagacggatcggctgccggggcgtgcccaggccgatcgccacctccgggcacaccggtacgaattcgaaatgcctggcaagcgtctcgctgcacaggcgcgactccttgtggccgccgttgaatcgcaccggctctccgagcaggcaggcgctgatgccgacttttatgggcgcgcgagacgagctaagcatggggcgacctcaccgtgttgttgtacaaacgtaagtggctgtacaagttgagctcatcttaagtcgtccgttgtacaagtcaatgcttcttgtacaacgctaatatgtaacaaggcttggctgtaaaacggccggacgaacggccgtcagtaacccgttccgcccagccaggccgagcttcgcgaacagctcctggctcagcgcctggcttgccggggccggcctcgcattgaacaggcaatcgactaagctagaagtaaatctgtacaagtttttcaacctgtataagatgcggcatccgccgtgcggccgcgcaggtcggtccggtgttaacgctagagaggagggcgccatgaacatactgatcaccggtggtaccggattgatcgggcgggccttgtgtaagcagtggcttgcccaggggcatcgcctctgggtctggagccgctcacctgaacaggtggccgagcgctgtggtcaggcggtcacgggcgtcggtcggttgcaggagatcgatcaggtccctctggatgcggtggtcaaccttgccggcgcgccgatcgccgaccggccctggacgcgcgctcgacgcctgctgctgtggaacagccgcatcaacctcaccgaagaactgatcgagtggcttgccacgcgtgagcaacagccccaggtattgatttccggctcggctgttggctggtatggcgatggcggcgagcgggagctcaacgaggacgacggcccggccggcaacgactttgccagccagctgtgtggcgcctgggaggaaagcgccgtgcgggccaaacggctcggactgcgcgtcgtgctggtgcgtaccggcctggtgctggcgcgtgagggcggctttctgcaacgcttgctgccgctgtttcggctcgggctgggcgggcgacagggtaatggccggcagtggataccgtggattcatttagacgaccaagtcgcgctgatagattttctgttgcagcagccggcggccgatggtccttacaatgcctgcgcgccccacccggtgcgcaacgccgagttcgccaaggcgttgggccgcagcctgggtcggccggccttgctgccggtacctgcactgctattgcggtcggtgctgggcgaactgtccggcttggttctcggtgggcagcgaacggtcccagcgcggctggaggcggcagggttccgtttccgcttcgtcgatctggatgcggcattggcggacctgcgcaaggcgtaggcgctgtgtgaaaatagcgccgccggccaccggggcgacggcgcggtcccttaaaacagtagtcaggaatgtgcatgtccgagcaggcgttgttgttggtcaatctgggttcgccggcttccaccgaggtggccgatgtacgtcgctatctcaaccagtttctgatggatccctacgttatcgacctgccgtggcccgttcgccggctgctggtttcgcttatcctgatcaagcgcccggaacagtcggcccacgcctatgtctccatctggtggccggaaggctcaccgctggtggtgctcagccaacgcctggccgacgcggttcgcccgcactggaccgaagggccggtagagctggcgatgcgctacggtgagccgtcgatcgagcgttcgctgctgaagctggccgggcagggcatcaagcaggtcaccttggctccgctgtacccgcagttcgccgacagtacgacgacgaccgccatcgaggaagcgcgtcgagttatccgcgaacatggcctcgacatacagctggcgatcctgcagccgttctttgaccagccggaatacctggacgccctggtgcacagtgtgaagacgcacctcgagcaaccgttcgaccacctcctgctcagctttcatggcttgccggagcggcatctacgcaagaccgatccgaccggctcgcactgcctgcgcagtagtgattgctgccagcgcgcggaaggcgcagtgcttgccagctgttaccgcgcccaatgcatccagagtgctgccagtttcgccaaacgggccgggctgagcgcagaccaatggtcggtgtcgttccagtcgcgtctgggccgggcgaaatggatcgagccctataccgaggcacatctggaagagctggcggccaagggcgtcaagaagctgctggtgatgtgccccgccttcgtgtccgattgcatcgagacactggaggagatcggcgatcgcggtcgtgaacagttcattgcggccggaggcgaggagttgcagctggtcccctgcctgaataccgacgagcgttgggtcgaggcactggtcaccttgtgccgtcgggccccgttggcgctctaggccggcactgatacgcgtcggcccgccgcccagcatggcgggccccgtcgagcgctggtgctgctagtgagcaggctcgagctttagcgcttcgaactcttccagcggcaccgggcggctgaacaggtagccctggaacatgtcgcagccgttggcgatcagcagcgtacgttgcgcctcggtttctacgccctcggcgataacttccaggttgaagccggcggcgagggcgcaggtggcccgcacgatggtctggctgctggcgtcatcggccagctgacgcacgaacgactggtcgatcttcagctgatcgagcggcaagcgttgcagataggccatcgacgaatagccggtaccgaagtcgtcaatggagaagcgaatgccgtgctgcttcagcgttttcatccggatgactgcctcttccatgtcgtccagcagcagcgactcggtgatttccagtttgagcaggcgcggattggcaccggtgcgcgcgagcaattcgagcaagcgccgaacgaagtcggcctgatacagcaggctcgcgctgaggttgaccgccagcgtcaggctgcaccattgcggacgtccggcccaggcggccagttgctcgcaggcttgggtgagcaccacgaaatccagcgcttcgatcaggccggcacgctcggctggcccgatgaaatggaccggggaaagcaggccgcgctgcggatgttgccacctcaccagcgcctcggcgcctatcaagccgcggtgccgctcgatctgtggctggaaatggatcacgaattcgcccgcctcgagaccgcggcggatttcgtcttccaggcgcaaacgctcctgtacggcctgttgcatgcgtgggtcgaagaagcgcagggcgttcttgccagcctgcttggcctcgtacatggacatgtcggcgcgcttcatcagctcttcggcgtcgccgtcgctggagctgatcagcaccacgcccatgctcgcactgctgtgcaacagcagtgagcccaaccggtaaggctcgttgagcgcggagagtatcttctcgccgatctgctcggcctgggcggcggcatactcggcgttgacgtccaggtcctcgagcatgaccacgaactcgtcgccacccagacgtgccaccgtgtcagtactgcgcacttcgccaccgagtcgctcggccaccacgcagagcagttgatccccggcctgatggccgtggaggtcgttgacgttcttgaagttgtccaggtcgatgaacatcagcgcgccgtagtgctggctacgggccgtcgcggccaatgcctgtctgaggcggtcgagcaacaggcggcggttgggcaggccgctcaagggatcatagaaggccaggtgatggatacgttcttcggcttgcttgcgctcggtgatgtcggtgaaggccgccacgtagttggaaaccttgccctgagcgtcgagcaccgtactgatcgccagccactcggggtacacctcgccgctcttgcgccggttccatatctcgccctgccaggcaccagtctgctggatgctgcgccacatgttcaggtagaactcggccgaatgacggccggaggcgagcaggcgcgtgtcctggccgatggcttcctcggcgctgtagccactgatttcgctgaacgcctggttgacccgcaggatgcggttgtcggcgttggtgatgatcatgccttgctgcgattcgaaggcgatcgaggcgatgcggcgctcttgctccgcatgggcacgatcgctgatgtcccggctcaggcagactaccgctggtttgtaggactgtgccacgttgaggcgctgggcccggacctcatataccttgaggccgtcggcggcctggatcgaatactcgagcagtcccggggcgttggtggcgagtgtggtgcggatcagctcgcgaaacttcttggcctgcggcgcgggcagtacgtcttcgagagtcttgccgaccagtctgtccttgacgtcctgaagcaaggccgcgtcattggcgatgacttccagatagcagccgtcttcatcgatgaccagcagtacatcgggtatcgcctgggtgatggccctcaggcgggcctcgctcaggtgcatcgcccgttcgatctgctcgcggttgagcatgtcggccagtagcagtcccagcaggaccaccgcggtcggcaagaccagcaacatcggaagcgccacttgctccagggtaggtttgacgaaaggggctggcagcagcaggagcgaggccaccaccccggcatgcagcaacaggccgaacaccagcaactgccagaagccgacagctatccggccgcgccgataaaagtagcgatagccgaggcccagcccaatcggcagcgccacgttgagcagcccgacccagacccccgagccgccgagccatacccgataagcggcggtcactagccccgcgatgccggccacgagcggcccaccgaacagcgccgccatgctcagcaccacggtgcgtgcatcgaaaatgatgcccgattgcgctgcgatgggcatgagcatgccggtgatgcaggcgccaccgaaccacaggccagctatgaactgctccgacagatgatgcttctgcccccaatggcgcgctgtgaaagacaacaaccagcagagggcgagtagcaccgtggcgttttcgacgaaagcgtaagaagtcaaatgaacggatcccggtgcagccgccgtagataggcggaaaaccaatggcgtatggctattattcgcatctttttcgcgtgcgtgcacggcaatgtacgggccgctcgcggaaatgcggacaggccagcctcgatcggtggccctctatgcagggtatcggcgaagccaaagcagactgaagtgcggcgcagacatcgtcaggcggcaggctcagccgccaatcgcggcgagctgctcgcgaagggtcgcgacttcggcctccagttcacggacccgttgttcggcttcgacggtcgcggtgacgtctttctggataccgatgtagtaggtgagctgatcgccttcgttaaacacgggcgtgatggacagctcgttccagaaggcggtgccgtccttgcggtagttgcgaatgacgtgccggcagggcgtgccggtacgaatcgcctcgcggatcgcggcgatcgcgggctggtcacggtcgtcggcctgcaggaagcgacagtcctggtagagaatctcgtcgacctcgtaaccggtgagccgttgaaaggccgggttggcgtagatgaggatattgtcgtcgccttcctgttcggcaaccacgattccgtcattggaggcctcgaccaccaactgcagcaatttcgcattgatcatggggtgtctcgtatccgttttcgcgggcattctagatcagttaccctgcggcggcacacctgaggcgtggcaagtggatcccgcttcggcagagcatcgtggcggctggcggcgtcgtctggacctcaggcttgccttgcgaggcgctgcacgatccgggacgtatcgccgcggtaaagtcgctggttgtgagccctgggttacaatgccgaaaccctcacacgaatcgaccgtgtcatgaccgataccgcccgcgcctccacattgcattactccgagtcgttcaagcagcaggagctgtttccgatcagagaggtgtctcggctgaccggtgtcaatccggttaccttgcgcgcctgggagcgtcgctacggcttgatccaaccgacccgtaccgaaagcggccatcgtctgtactccatggccgatgtcgaagcggtgcgcaggatcctcgcctggaccgagcgcggtgtggccgtcagcaaagtcggcagcattctgtcacgcagcgaggcgagcagggtcggccggccgctggagcagccacaagcggtggccagcgaatggagcgagtggcgggcgcaggtgcagcaggccgtgaatcgcttcgacgacaatcgcctcgaccaactctacggtcagattttctcgacctacccgcttgcagttgtgtttcaggacatcctgctgccgctgtggcagcaattgctggtgtgccagagtgacttcggtcagaccagcgaatggctattcttcgacaattttctgcgtgcccgcgtgctgcaacgcctgcagctgggtcgcgcgcaaacggacgatcgtgtggtcctcgcagcgatgccgggacactgccgcgaattggagttgctggtcgccggactgttgctgtcttgcgatcaggtcgcggtcagcgtactggccatcggacagccactggatgagctggcgctggtctgcgaaaaggtgcggccacgtgcgttggtactgtattccaatgccccgcccaaaatgccgctgcttcggcaggtgcgcaagcttgcgctgcggctcgattgcccgctggctatggctggcgagacggccgaggacgcgctgcggggctcgccaatcgcctgcctgggcagtgccagcaggctgatgcagcgccgtcttctccagtttctggacggcaagctggacacctagccgcgacgcttgccgcgtggcgttcggcaaacgatgctaaagcggcattgcggccctgggtgatgggcgcgatgctcatcaatccagccgcaacgggttcttgcatgcctcgtccatccgacacctcccggcgaccgcctcagaccacactggccaacggcttgcgggtgcgtctgttgcccctttccggccattcgcaggccgcggcgatggtgcgagtccatgccggtgcccatgatgcgccgcgggactatcccgggttggcccattttctcgagcacctgctgtttctcggcagccgaggctattcggcggaagagggcctgatggccttcgttcaaggctgcggcggacaactgaacgcatcgactcgcgagcggtacaccgacttcttcttccagctaccggccggtcagctcgagcccgccttgcatcgcctcctggacatgctggcgcatccactgctcgatcctgccgcccagctgcgcgagcgtgaggtattgcaggctgaattccaggcgcgcgcgcgggatgtcgaaacgctttgcgatgctgccctgggcacggccttcgacccgagccatccgttcgccggcttccacgcgggcaaccgcgacacgctgccggtagagcaacccgcgttccaacaggcgctggttggctatcaccggcgcttctaccacagcggccagatcgagctgctgatcaccggtcctcagagccatgcacagttgcagcggctcgccgagcttgccgacggcatgctggcagcgggctgcccggtcacgcgggacgcgccgccgctgcgttgcagtcgcgatgcctggctccggttgcacatcggcggcgccgagccccggttgaacctgctgttttcgctcgaacacatgcccgagcatagtcaggcggcgctggatgttctttccttcgcggtcacttctcaggcacagcacggcttcgcccggcgcctgcgcgacgccggtctgtgccattcggtcaggctacgcacgccgtactggtttgcggggcaaagcgtcgtcgtcgttgaactgtcgttgacggagcaagggctgggcgagcgcgcggtgatcgtcgaggcggtgctcgactggttgcgttattgctcaggcgagtcgtactggcagctttgccatggcgaatatcggcgcgtgcgccaacgaagcctgcaaggcgcagaacccttggccaagctgcgtcattgggttgagccgctggcctggagcgacgacagcgatgagtccgcgattcgccaggcgttcgcggcgcttgtggcgcagatgactgccacgggaccgctggtgatgactgccgacgactgcgattgccaacccatcgagcgcgcaggcttcgcgctgcgactgaaacgggagccgccgctacaggcggagcaaaaggcatggcattggcggccgccgtcgatcaatccctggttacagaccgctgcccgccagtaccaggcgagctcgatgccgccggcgctgcactggctcgggccggccgacgcggacgggcagggcgcgttctacctgcgctggcagttcccggcggggcaagcggcgccgggactccggcatgtgctgcgacacgcgcttcagtccgtcgactgggctgtgcaacaagcaggcgtgagacagcggttagatgacctcggcgacgcctggaccctgagcctggtgggtgctgccgaggccatccccctgatacttgccgatattgccgagctgatgcgccagcctgcggaggcgtcctttgttcaggggcaacggctcgcggaacgtgaggtcgcgttgggcggtgacgagatgctgattcggcaattgctcgaccgcatgccccgactactggcagacgcaacgccggctacgcattgcgaagctctggatgcaggcaggctctggacgcagtggaggtcagcgcagtggcaggcgctcgcgacaggcttcccgccgacgttgagtgggccgttgaccgatgcgctcagggcgttgccgggctctgcatcctcgatatccattgcgcccggtggccgtttggcaggcatacgttggcacgacgtgagcggtggggcggcaatggccgaggcggcgctcctgctgttttgcccgttgccgcagcaaaccgccgtatgcgaagcggcctggcgcgtattggcaaggttgatcgaaggccccttctttcgtcgcctgcgcagcgaactgcaactgggttacgccgtcttcagccgcttctgtcagttcggttgtcatcccggcatgctcttcgccgtgcaatcgccctctgcgtccgcagaagagatcctcgcgcatatcgagacttttcttgccgacttcgccagtagcctggacgttctacctgcaggcgtcatcgagcgagccgtgcgcgatgcgagcgatacgcacctgatcgccgaaacggatctgcgggctcgtgcggaacagctctggcagagtcttctagccggtcatgacgccggccacctgcgggaggttgcgtccgccatgcgcgctctgcaacgccaggacctgacggccgccctggccgtactacgtgcgcgcaccgccggctgggtcgtggtggccaacgccgctgcgcccgccgcggcgcagggctgatcccgagccgttactccttcgtttatcagattcaagctgccccctgcctgccgtcctgttggcgagccgggccggtacgcgtgcctacctaagcgtgacggcgtacgacctaagcgctacgacggacggaacgggcacgatcgccttagtacgcaagacggcgagctcggcgaaagtagtagccagtcgccgctattggagcctatgggccctcggttgcgctttcgataatccgcctcgacacgactgcctgtcgtcacatcagcggagagcgccatgcacaacaagaagaacgtgagtacaaccctgatcccgttggccctggccagcgcgattgccatgatcctgagccagtcggcggttgccgaaatcaagctgtacgacaaggacgacactacattctccgtcgacggctacttcaataccttctacgtcagcagcaaggtcgaccgtgccggcgaacagttcgatcgcgaccagtcgcgggtaaagatgggtttcctgcccaactacatcggcttcaacttcggcaaacaactcgatgacgtgaaagtgggcggtcgctcgtccttctgggtcaccatcaacgacagcgacagcaacggtaccgagaccggcatcgacgtccgccagttctacggcaccgcatccaacgaccagtggggtgaggtgctcttcggtaaggacttcggtctgttcggccgctccaacatcttcctcgacgagatgctcaccggctacggccaggtcagcgacaccctgggtctggtcgatttcggcggcgtctccttcggcaacatcggtaccggctacccgtacccgttcccgacgtcccaggttacctatcgctcgccggtgatgggcggcctgcgtatcgctgccggcatcatggacccggtcgataccacggacgaccagagttcggcgctggatgaggcctaccaggacagcccccgcttcgaaaccgaggtcacctatcagttcgacctcggcggcgcgcagttctacacctgggtcaacggtatgcagcagagctcgaagaataccgacagtacggtcgacgacgtcgattccaaaggtctcggctatggcgttcaagccaagatggccgggttctcgctcaccgcgtcgggcttccaggccgagggcatcaacccgttctataccaataacgccggtaaagcccacctgcgcgatgtcgacagcgatggttacctgctgcaaggctcctacaccttcggcaagaaccgcatcgcgctttccaccggcaagaccaaggatgacggcaacggcctgggcaccgcagccgactaccagacccgcggcatcgcctacttccgtaccatcaacgacaacctgaagctggttgccgaggtgaacgagttcgagttgcgcggccacgacacggacgccctcgacgaggacacccgcaccttcgccatcggtgccacgctcagcttctaaaccgcctcaacggtcaccagacgggcacctctcggggtgcccgttttttgtctgatcgcctgcgcttcacccgctgccagtcccgcggtctttcgtcgctttgctacctaggcatgtcgtcgccggtactgaagtagcattttcgtacccaatgccctgaccaagaatgaggtcatacgataagtgtgtattggggtgcgtgcgtgatcgagcaagagtccaaagaagtgcgcacggccatgtcagaggcgcgtgatcccgaaacggtcgcccaggatctggctcgccagctgatccatccgcacctgggcttcgtcctgttcttctgttcggccgagtacgacctgcccgcgctgggaaccgccctgcatcagtacttcgggggcgtccggctggttggctgcacctccgccggggaaattacttcgcaaggctacggtcgcagttgcgtcaccgcggtcggcttcgatcaccgtagcttctcgatcgcatgcgaactgatcgacgagatggaccgcttcagcctcatcgacgcacagcaactggtcgagcgtctgggcagcgactgccgcagcaactcgctggcgccaatcaaggatcacagtttcgcgctgaccttgctcgatggcttgtccagccgcgaggagatcgtcctgtcagcactgagtgccgcgttcggcagcattccgcatttcggcggctcggccggtgacgacaaccatctgaccgatacccacgtctattacgacggccagtttcacagcggcgcggccatcgtcgtgctgatcaacacctggctcgatttcgaggtgttcaccacccaccacgtcctgccgcgctccgagaagctggtggtcacgcgcgccgacagccattcgcgccgcgtctatgagctcaatgccgagccagccgcagaagagtacgcacggttgatcggtgtcgaagtcagcgaactggatcaccggctgttcgcggcgcatccgttggcggtgcgcatcaacgagcactactacgtgcgctcgattcagaaggtcaacgaagacctgagcctgacgttctactgtgcggtggaaaacggcatcgtgctcaccgccatgcgccccggcccgctgatgcccaatctggagtcgctgttcgagcgtctcgagcagcgcctcggtccgccgctgttgaccatcggctgcgactgtttcctcaggcgcctcgaaatcgagggcaatggctccacagaagacacttcggcctttcttcgacgccagcaggtgatcggcttcaacacctatggagagcagttcaatggcatgcacatcaaccagaccttcaccggcgtcgccatcggccggcctggagggcggggcagccgctgagctactcgtcaggcaggctgagctcgaacgcgagaactacaagctgcgtcgcatcaacgacgccttgatcgagcgtatcgaatcgagcggcagcggacgcgacgcctcctatgcggcgtttcagcattcggtcgaactggccgagcaggtgcgtgagcggaccgatgcgctgaaccaggcgatggccgaactcaaggccagcaaccgcctgctcagcgatgcgcgcctgcgtgccgaaaccgcgcatcagcatctggtggacgccatcgagagcatctccgatgccttcgtgctgttcgacaaggaccagcgcatcgtcctgttcaacaagcgtttcaagtcgctatggagccgcacccgggcacgcatcaacagcggcacacgactgtcggagctcaagcggctggccgaaagcagcggcatgatcgccgaagagcaccgcggcaaggccaacgagccgaccgtctaccgcctgcataacagccgctgggttcaggtcagtgaacggccgacccgcgagggcgggttggtgatgctctacaccgacatcaccgaggtgaaactcagcgagaccatgcgccgggaacaagccttggcgcaaaagtcgcgactgctgcagcgggccgtcgacaacctgtcccagggcgtggcgatggtcagcgccgatggcagcctcgaactctggaacggccgcttcctcgaactctgcggcctggcgccaatcgaggcgcatcggcctttcgaagaggtgatggccgacagcgaactcaagttgctgacacccaacaccttcgacgccgatggccagcccttgaccgaactggaacagcatctgttcgacggccgcacgctggagatccgtacgcatccgctgcccaccggcggtttcgtcaacactttcaccgacatcaccgagcgctatcgccatgccgaagccctgcgtgaaagcgagcgctggattcgcctgatcaccgaccacgtgccggcgttgatcgcctacgtctcggcggacctgacttacgagttcaccaacaaggtttatgaggaatggtatcgctggcccagcgacggcatgctcggtcaatccctgcgtgacgttcacagcggccagcactggcagcagttggagccctacatcgaccgcgcgctgtccggcgaaagcgtcagcttcgagctggccgagcgcaaccactccggacagcagcgttacatgctgcgttcctacgtgcccaaccgccaggccaacggcgaagtggcgggcatattcgttctgatccaggacatcaccgatcgtcgtcgcaccgctgaggccttgcatcaggcctatcagaacctcgaacagcgggtgcgtgagcgcacggcggagctgaccagcctgaacgagcagttgctctgcgagatcgacgagcgcgcccatgccgaggcgcgtctgcgcgaggccaaacgcgaggcagagctggccaacctgtcgaaaaccaagtttctcgcggcggtcagccacgacctgctgcagccactcaatgcggcgcggctgttcaccagcgcgttgctcgaacaacctgcggcacccagcagcgggttgatccgcaacatcagcaattccctggaagatgtggaaaacctgctcggcacgctggtggacatctccaagctggatgccggtgtgatcaagccggacatcgcgccgttcgccgtcagtgaactgctggaaaacctggcggtggagtttcgccagattgccggcagcgagcagctgcgactggacttcattccctgttcggcgctggtgcgcagcgacatccagctgttggcgcgcatcctgcgcaacctgctcaccaacgccattcgctacacgcccagcggccgcgtgatgctcggctgccgtcgccgccggcagagcctgtcgatcgaggtttgggataccggcgtcggcatccccgaagacaagcttgaagaaatcttccatgaattcaaacgcggcgaaggcgtgcggccgcagcaggaccgcggactcggcctgggtcttgcgatcgtcgagaagatcgcgcggattctcggccatcgcatccaggtcagttcggtgccggggcacggctcgaagttcgccatcgaagtaccgctggccaagcgggcgccaaaagccaccccagaggtcgccagcaccgatctgctactggagcggctgaaaggcgcgcgggtatgggtgctcgacaatgacacggcgatctgcgccggaatgcgtaccttgctggagggttggggatgcaaagtggtcaccgcgctttccgagcaggatctggccgggcaggtcgacaacttccacgccgacgccgacctgatcatcgccgattaccacctggataacggctgcaacggcgtcgacgtggtggagacggtcaatgcccgacgggcaagccctttgccggcgctgatgatcacggccaactacagcaacgagctgaagcaacaggtgcgagagctgggccacatgctgatgcacaagccggtgcggcccatgaaactgaaaaccgccatgtgtcacatgatggagcaggggcattcctgacctgcgcggggcccgattcgcagggcttgtctgagcaggtgagggtgtcgcaggggcgatgcctgctgggacgacgcagcccctggctcagctacggatggttccagccgagcgggtgcccgaagcgccgttcgtagcgatcgggcgtcgtcgaatattggtctgggtgcctttgcaccagcgggcaagcgcgcttggcggcaggcgtggcgaaggagcagttctttgtctcaacgacgcaagtaggaagtgaagtctatatcgccggccgagaggattgcttgcacgcgattgtgcacgttgagcttgcgcaggatggctgagacatgggccttgacggtggtctcggcgatgtcgaggttgtaggcgatctgcttgttcgactcgcccttggtcatgcgctcgagtactaaaagttgcttgcgcgtcagggcctgcaacagctcgggcgggatgctctgttcattatgctgggcgcggcgagtgctggctttctggctgcgaatgatgtccgagggcaggtagacgttgccgttgagaatctgctcgatggcatcggtcatctgtgcgcgcggcgacgacttggtgatgaagccgcaggcaccataggtaatggcctgcagcacgatctgcttgtcctgctcggccgagacgatgaccaccgggatggtcggcgcttcgttgcgcaggttgatcagcccattgaggccgtgcatccccggcatgttgaggtcgagcagcaccaggtcgagatcgtcgttctccagggtgatggccagggcgctatcgaggtcagcggtctcgaggatctcgctgccgggaaaaccgtcccgaatcacgttctggatggcttcgcgaaacagcgggtggtcatcagcaatcagtatcttgtacaaggccggtcacctcatttgttgtgattatgcgtaggtgtggttcggtaaaggcgctcatgccacgcggcgtcgccttatccgggcgcgtgctcatgatccctgcctgtcgccagcctctcctcgcggctgcacgtctgtcggcgtagcggcggcagtgggcgcctggcgcagccgggtgatatcgggcaacccgcccagggctgcgttcgtcgatgccgccggcacgccaggcttcatctagtcccccaaggacttaggtcggtcacattacagggcaaaatgcgccatgttggaaatcctacgatcgacatcgaaaccagtaccaaggtagtaaagctttattcaagcagcccgtcgcagtgcggcgtgctgcgggttgaagctgagaaccgacagcaaactgaacagcagcgtcaggccgaggcagacccccagcgacagcggatcgaggcgttcgtacagcgcatagcgaaccagctccactgcgtaggtgaacgggttgaccgaacagatccagaacaaccattcgttggcttcgcgcattttccacagcggatagagggccgaagagaggaagaacatcgggaagatgacgaaattcatcaccccggcaaagttttccagctggcggataccgttcgacagcagcaggcccagcgcgctgagcagcaacgcgaccagcagcagcgccggtagcgcagtcagcagcccagccaccggcggctgcacgccgtagaaccaggcgatcgccaggaaggcatagacctgcagcagcgagatcagcgaggtcgccagcagtttgctcgccagcaggaagctgcgcggcagcgggctcgtcagcagcacgcgcatgctgcccatctcgcggtcgtagaccatcgacagcgaaccctgcataccgttgaacagcaggatcatgcaggccaggccaggcacgatgtaggtctcgtaggtgatgtaggtttcgtagggctcgatgatggcgatccccagtgccgcgcgaaagccagcggcgaacaccaccagccacaggagcgggcgcactagggcgctgaaaaagcgtgaacgctgctgcacgaagcgtagccactcgcggccgatgatggcgcgcaggcattcccaataggcggtcatgaaagttcctgactgaggatttcggggcagaagttcagggacacgaaggctccagaaaaaggttgccggtgccgtgggagcggtctcgaccgcgaacgtgcctgtgcattctcttcgcggtcaagaccgcccccacgaggggaggagagcgtttcggggcgcaaggattcatgtcgcacccgctggctggtgagccctgcatggtgttgaacagggacccagaaaaagtcgccggtgccgtggggggggggggggcccccccccgggcggggggggtggatttggggggtggccccg

SEQ ID NO: 26 - DNA, 58191 bp, Pseudomonas sp.
agcgatgagaaactggcaggcaccgagcggtagttgtgcgctcatgcctgcggctcggtggaacagctctagcggaactcgctacatcgctacatccgttcaccccacgagcatgacggcggggcgcttagggggcatcgtcttcggcgccccgggcacagcctgctgggcagccttcgagccgcgctttgaaagcgccctttgcaatggcgcctcgataccccagaaacctgtctgcagttcgcttgggcgaaggggaactcgacggtaatgtgcatacctacgtcgaagagtggcccgttactatctggccttgcccgctgcccgctgcccgctgccgccagtcgctggaacatgggtgcggctatacgcgctaacgctatggtttatgtccgccttaacggcgcagcaacgtgcgcccggcgcactggcgttgcgccattggggcgaaagaaggcttctaaaaaaggcacctcgagccgcttccgcagcttggtgggggcggtcggtatagtgtgcggaggtggttgccgcagcgctaaagcatcactcaggcctgtaatcgttgtgctcagcccgcatcaggctgagcacaacggccgtgagtgcgctcactcaacggcttcggcgatctctattaccgtcgtttccgcggcggctgagctggtgtgctcggcctgttcccgccgcttgatgtacttccagtccgcctcgtcgatataaatcccgcttggaccgctgccgccttccaggtcgatggccacgtgcgctgatacctgaggtttaaccgacgccagaatcggaacgaagcccagctgcagactggtttcgatcagtgcctgctggttgcgctcatcgatatcggcggcctcatccagatagtagggaaggcgaatgcgaccagcctgttcgcggtccatcaagtgcagcaacagatacatgttggtcagcgccttgatggtcatcgttgttccgttggacgcggcgccgtcgatgtcggtgtggatcactggttggccaccgactttcgtaatctcgaacgcgagttcgaacaggtccttgagacccagctgattgttgttggctgctaccaaccgcgctagatactccttggcctcctcgttcttgctgtcctgttcgctgctttgttgcaggtcgaagactgacagcgtttcaccctgctcatactgtccggcgctgtggatgatctggtcgatgtgcttgagcgcatccttgttaggtgccagaacgattcggaagctttccaggttcgagacttggcgcttgttgatctcgcggttgaacaacgccaactgatgctcaaggctgtcgtaatcgctgcggatattgcgcaaggtccgcgcgatatccgtgaccgccgcgcgacgtgccttggcgagcgtcagggcttcgtcctggcgatgcgcgtaggcgttcactagcagctgtagccgccgctctggatcttcttcgctgtcgaacttggctacacccttgagacgcacctgcgcgtagagcgcttcgatctggccgtcgacgcgctgcaatgcctgccagctgtcctggtagtcgttgagcagcggctggaggttgtccagcgagtcgtccacctgatccatgaacggcgtgccgaagggcagatcggccggaagcaactgacggcgacgtagtgcgtcctccagcgtgcgttccttggcttcgagatcagccaactgacggccgaccagctgcagtttcgccgagaggtgttgcacccgctcagtaaacgcatcgctcgtccgcttgagttcgtcctgcgccgcctcggcctgggcaagctgctcgagcttgctgtcttcttcggctgagagcgtctggcaacggcggaaatcctccagcgctttctgggcgtccagcacctgctgataaagctgctcggcctgcgccttgctcgcggcgcggtcgatcgccaccaaatgctgggccttgagctgtttcagctcgcgctccaaccggtctttctggtcacgcagcgcggcgcggtcggccagggcctgcagggcgggcggttcgatatgggacaggtcgatggacagcccgggcgcctcgaagcgctctcccttgaaaccgtcgagtaccgcttcgagcgacttgacccaggtatcgccatcttccacggcaatgcccttgtcacccaacggcaagctgaacagctggccattgaacagccgcatcaggcgatcgacgtcggcccgggagaactcttcgcgcagacgggaatagctgttgttgtccgcatggtccagctgctgccggaccgacttgaggcgcttttccaggtcgcgcaagcgctcgtcgagatcctcgctggagaactggcgtgattgcgacagcgcgccggccagttcatcgtgggcgtccttggcggcgagcaactgctgttcgagcacatgtgcatcgtcgaccagcgcgaagcggttcttcagcgcggagagttctcccagccaacgttgaatctcgctgatctcgcgctccaggcgcatcagttcggccgtgccgccacgctgctcgttctgcaggccatcctgctcgcggcgatagtgttcggcctggatgaccagctcttccttgcgtgcgccggcatagtcctgccaggtgccgagcagcgagtcgagcaagggggacaggcgatgcaacttgccgcgcagcacttcacgctgcgcaaccccggcggcgagggcttcgaccagcggaccggctgcgaccagtgcctggtagtcctgctccatgcggcgcacgtcgcggaaggcttcttcggtggccgcaatatagtcgacgctgccggagcgcaagctgtgctcgaacgcgtcgaggaacagctgcttgagcttggctgcggtgatctcacgcatatgcagcagattgatgaacagggcacggaaggtcttcagactctgttcgctggtcgagcgcaacggaatcagcgtcatgtccagcgggatggcggtatggccaccgaccagcagacggcgaagctcgtcaggcttggcctcgtacgccttgatgccggcgcgctccagattggcgaacaactcacgttgacgcaggcaggtgccgttctgctggtagtgatcgaggtccagcgaaccctggtagacaaagaactgatggccgaacccgccacccggcccgcgacctgccacaccaatcacgtgcgggccatggggcagggcgacctcgaccaggatgtagctggtgtcgctggcgaagtagaacttgcgcgactgctcgaggctgtacttgccgaagctcatgtccgacatgcgcgccaggatcgggaactgcagcgcattgatcgaggcggacttgccgaggttgttggcaccgtagaccgacagcggcgtttccagcgggaagatgccgaggctgtaacccgcggtgttcagcagggcgaagcggcgaaggccgtagcgttcctggctcatgcttcaagctccttttcttcggcgatggcacgcgccaaggcctcttcctcggtttcgtcggagtcgcggtcgatcaggatgatgtcgtcctcttcttcttcggcaataagctgtggtgcaggcagtggcaagtcgctgctgtgcaggctcgccgccaggtcgcggtcctgctgaacggacaggcagacatcaaggaagcggtgcatgggcggcaggaagcggtagatgccgttgctatcttcggcgaagcccagctgcgtcaggcggcggatgaccttttcttccagttcgtcctgtgtggtgacttcggcctgcaagaacaggtcgcggtacttatccagcaatgccggcagctcgtcccggcccagggtgccgccgtccagcaccgcgagcggatcgcgaccctgatcggccaggtgctcgaccagaatgaaggtgaacagcgccaggcgctgggccgtcttgttgacctgtgcgcccatctgctcggggacgaagtagtagaagccgcgcgggtcgcagaccaactcgaagccgagcgccttgaacagcgcacggtactggtcctgcatattggaaagctgggcgtagcattcgggctcgctgcgggacaggtgatagcccttgaacagctcgcggaagatcggcgccagctgggtcatttctttcagatcgatgttcatacgcaactcaggcaatcgtcgtgtgaaaccgcgaagcgcttttcacgaaaatgaatgttcgggacggacggccggttgaccgtgcagcaaggctcaaccattggcagtggccagcagcgcaaaggagctgaggctgacctgatgctcgcgcgtcaggtactcgcgccgctccaggcggtcgcgctgaaaacgcgcgtcgcgggacaggcgcgaaaaccagtagagcagctcatcggtcgcaccttccggctcctgctcgagcaaccactgcatcagatccggcagcggcagtgcctgttcgcagcggtcgagcatttcacgtgccgtcagtggagaacgcggagcgtctgccttgcgcttgctaccggctcgagggaactgcgccggtttcggctcgaagcgggccagtgcgtagacataggcttcgacctggctggcggagccgagaaaggtactctgcggccgggtgaacagtggcagcgacgcctgcggcacggcatcgagacctttcttgcggatcgccgacagcgccagtgctgcgccgcgggtcacggcgttatgccgacgcgcctcctcgcgcaagggcagcaacagctcacgcgcatggcgcagggtcagctgggcggtgctctgcatttccagaatccgcgcgtgggtgcgcagcaacaggtcatcatcgaccaactggccgagtcgttgctgctcgccgagcagcttcatcagcacttgctcgacgcgatagacgccctgttcgaatgcgccatcggccgcgaccagctggatcatcggctcgacgtattcatcccaggtcgccagcacctcggcataacgttgccgcaacggaatctgccgatcgctggtcttggcccggtcggcgacgccgatcagcgcttgctcgtcgttggcgagcttcttcagcacgtcgcgcacgcgcatgtccagcaggcgcagctggcgggcaaggtcctgcccgtcacggatctcgaaggcgtcctgaatgtgtccggccaggcgttcgaggtggcgcaggtaggcttcgatttccaggcacaggccgagccgatgttcgcggcgcaggtaggcgagaaaatcatgaatctgcgcgttcagctcgaagcgattcgggcttttcgccaccgggaccagaatatccagacggatccactgatcgagcagggcggtaatatcggtgggcgtgccttccggtagctgtgcggccagctgatgacgaagctcgatcaggctcagggtgccggcatcgaagcgctcgcacagcggctcgagcaacgtccagtgttcggcgagggcacgcagtacgcgcttgggttcgatcatctgaatcggttctgtcggctgcaaaaatagtcggcaattgtactgcctgaccccagtgcaaatcagcccaaaccgatcgttgggatgacgcaatgagacgccggccttcccgctttgctggtttccggccacaattcacacttgaggcgccgcctgagtccgcacggcaggccaagaggagttcgacatgagcagcaacgaccgcgtcatcatcttcgacaccaccctgcgagacggcgaacagagccccggtgcctccatgaccggtgaagaaaagctgcgcattgccaaggccctcgaacggctgaaggtggacgtgatcgaagccggcttcgccatcgccagtccgggcgatttcgccgcggtgaaggcggtcgccgataacatcaaggacagcaccgtctgcagcctggcgcgtgccgtcgacgccgatatcgagcgcgccgccgaagccctggccggtgccaattccggacgcatccataccttcatcgccaccagccctattcatatgcagtacaagctgcgcatgcagccggaccaggtcgtcgagcaggccgtccgcgccgtgaccaaggcgcgcaatctctgcgccgatgtggagttttcctgcgaggacgccgggcgatcggagatcgatttcctctgccgtatcatcgaagcggccatcgatgccggcgcacgcacgatcaatatcccggacacggttggctatgccatcccgcatcaatacggcgcgatgatcggcaccctgctcgagcgcattcctaacgccgacaaggccgtgttctctgtgcattgccacaatgacctgggcctggccgttgccaactcgctggctgcggtcgttgcgggcgcgcggcaggtcgagtgcaccatcaacgggctcggcgagcgtgcgggcaatgcggcgctggaagagatcgtcatggcgatcaagacccgccaggatctgctcgacgtgcacacccgcatcgagacccagcacatcctcagcgcctcgcgcctggtctccggtatcaccggttttccggtgcagccgaacaaggccatcgtcggcgccaatgcgttcgcccatgaatccggcatccaccaggatggcgtgctcaaacatcgcgaaacctacgaaatcatgtccgcgcaatcggtgggctggaatgccaacaagatggtcatgggcaagcattcggggcgcgcggccttccgttcgcggctcgaagaactgggcatcgtgctgccgggcgaaggcgagctgaacgccgcctttgcgcgcttcaaggagctggcggacaagaagcacgaaattttcgatgaagacctgcaggcgctggtctccgataccctcgccgaggacgtgcaggaacatttcaaactggtgacgttggaagtggcgagcaagaccggcgaagtgccgaacgccgagctcgtgctcaacgttggcggccaagagcagccagcgtcggggcagggctcgggaccggtcgatgcgaccttcaaggccatcgagtcggtcgccaattccggcgcgacgctgcagctgtattcagtcaacgccatcaccaagggtaccgattcgcaaggcgaagtcacggtgcggctggagaagggcgggcgcatcgtcaatggcaacggtgccgacacagacatcgtcgtcgcctccgccaaggcttatctgaacgcgctgaacctgatgcaggtcggggccaaggcgcacccgcaggtggccggggtttgattaccgagaaccggcgtcgagccttcctcgacgccatgcagatcacttcctggttgccgcgcacggagctgcctttcgccgcgccttcgcgcccggcattgttgcagcgggtcgagcctgaaccggcgccggtcttcgagcccgaacagccggcgccgcagccgactgccgtggcggaccggccggttgccgccgcgcccaccgtcacgacaagccccgcggccgatgcggttcgtgcagccatgccgcgcattgccgtacccgagccgaaacgctcggccaataaacccactgatgaacagccggtcgttgccgaacagaagctcagcgtgccgccaccgcgtttcgccttgcaactgctgcgggcgggcaactgcctgctgttggtcgagttgcccaccggtgagtcattccagagtcgcgatccggcctacctgctgctcaaggacctgcttcgcgccgccagactgccggacagcccgcaacaggtcggagacggcgaaccgatccgctggccgctgctgcatcgcggcagcctcgatcaaggtgccgaagcggcacgggattacgtgcaaggcgtggtagccgccgagttggaagatatgggttgcgcctgcctctggttggtaggcctgccggcgctgcgcttcgctggtgaagtggaggcggacgcctgctaccgcgagctgcatatcgaaggtatcggccatgcactggcgatgcccggcctcgaggaactgatggagcagcctggcagcaaggccgcgctgtggaaagcgatgcgccgcagcatggcgcgttgggtcacgggtttatgagtagtgcttcatgagtgatgcagtcagcttccgccccatgaccgcggcggatatcgaaacagtcctgaaaatcgagtacgccgccttcagccatccctggacccgcggcatcttcaccgacgccctgaccgcctacgaatgctgggtcatgttcgaaggcgagcagcaggtcggccatggcgtgatcaacgtcatcatcgacgaggcgcacctgctgaatatcaccgtcaagccccagagccaggggcgcgggctggggttgcgcctgctcgagcatctcatgcagcgggcccagcagcggggcggacgcgaatgttttctcgaggtgcgcgccagcaacacgtcggcctatcggctttacgagcgctacggcttcaacgaagtagggcggcgtcgtggctattacccctccgctgacgggcgcgaagatgcactggtgatggcctgtacgctgatcgactaagccgtctgaaccgaagacgaccgaggccgcccgggccgccgtagcatggggaacccatcgagtcgaagtgatgggctccacccttcctacttaaggcggcgcggcttggtcactgccctggcgccttgtctcggccggaatccagcggcgcgtcgccctccagctcgttgtcgtccatcacgtcatcgttctcatgcagcaccgcgtcgccgccgccgagccccgtgtcccggtcgcctttcgccgggccgtcccatggtttgccgtccaaagggtcaacgcgcccttgttccgcttcgtccagatccacatcggcgccgatttggtgctccgagacttcagtcagatcctgatccgctggcccgccatggccgcgctcgttcggcgagcgtgagccgtcctcacggatcagcgtttccggcgccagatcgtccatggtggtgtcgccatccgggacttcgcccgtggtcatgcccgcttcggctacgcgctcgggcggaaactcatcctcgatctcctcggcgggtacctcatcgccgatacgacctttgcgatcgtcgcgatgctgatcgaaatcgagctgctccatcgagcccatgcggtcttccgtgtcgtcgatttccgtgggcgtgtagggcttgcgatcgttcatgacaacctcctgattgagctgcggtcttgcaggttgtgacctggcctcggtgtgaagattcaggctggctgctggccggttcgggctttatgcaccaagctgctggagacacctgttgagccggcgggcctcgacggtggcgcaaaaaagtgcgaaccacctttatcgatccggagtctcaaggagcatgaacaaaccaaatgaccgacccgggctagaggtccggcgctgcgcttttttcttcgacgtcgacggtacgctggcagaaatccagccccgtcctgaactggtatccataccccctcgctccctcgcggccctggagcacctgcacgtcagtgacgttcccgtcgctgtgatttccggacggccactcagccagctcgacgccttgctcgccccgctgaacctgccggcggccggcgtgcacggcgccgagcgcaggaccgccgcagggcagatgcaaaacctggccctcgatcctgacgtttttagcgcgatcgaacgcgagctggcgcaagcctgtgccgagcatccgggactggtgctggagaacaagaccgtcgcattcgccctgcattttcgtctggctcctgaactggaagacgccgcccgcgccttggcggagcgattcgtcgagcgttatgcagaggtgctgacgctgcagccgggcaaatgcgtgttcgaactcaagccgcgcggcgccagcaaaggcgaggtgatacgcgccttcatgcaggagcccccgttcaaagggcggctgcctgtgttcgtcggagacgacctgaccgatgaggcaggctttcgggtggtgaacgaactgggcggagtcgcgatcaaggtcggcaccggccccaccgacgccacacagcgtctggactcggtggaagccgtcggcgactggctcgaaagcctgctctgcgccttgtccgaacagccggcaaatccaataaaaccagactgaagcgagaacgacccatgagccgactagtagtggtttccaaccgagtagcgccgatcaaggcggggaaggtcgctgctggcgggcttgcagttggcgtctatgacgcgttgcgccaagccggaggcatctggtttggctggagcggcgacgtaagcagcaccccgcagaccaacaccgagaccatcggcaacatcacctacgtgacgatgggcctgaccaagcaggattacgaccaatactaccgggggttttccaacgcgacgctctggccgatcttccactaccgcatcgatctggcccgctacaaccgtcaggaatacgaaggctatcggcgggtcaacgccatgctggccgagaagctcaagccgctgctcaagcccgacgacatcatctggatccacgattaccatctgatcccgttcgccgaagcgtgccgccagctgggcattcgcaaccgcatcggcttcttcctgcacatcccctttccgccgccggaaatcctcacggtcatcccgccgcacaacgaattgctcaagaccctgtgcttctacgacctcatcggcttccagaccgaaaccgatcgcctggccttccaggactacatgacccgcgaggtgcgcggaatcctggaaagcgatggcagcctgaccgcctatggccagaacttccgtgccggcgtgtacccgatcggcgtggtgcctgacgagatcaccggcctggccgaatcctacaaggcgcgccgcaagcccatgcggcgcacgaccgacgtggcccgcaagaagatcatcagtgttgatcggctggattattccaaggggctggtggagcgattcagggcatacgaggcgtttctcgaacgctatccggagcaccggcgcgccgtggagttcgtgcagatcgcgccgacttctcgctcggatgtgaagacctaccagcacatccgccagcagctcgaaagcgcggcggggcacatcaacggctggctgtcggatctggactggacgccgctgcactatctcaacaaaagccatgatcgacgcgtgctcatgggcctgttccgcagcgccgacatcggcttcgtcacgccgctgcgcgacggcatgaacctcgtcgccaaggaatacgtcgcctcccaggacccggaagacccgggcgtgctggtgctctcgcgcttcgctggcgctgcgcgtgagcttacctcggcgctaatcatcaacccctatgattgcatcggcatggccgaagcgctggaccgcgccatgcgcatgtcgctcactgaacgcaaggatcgctacgagcacatgatgcgggccattcgtgccgccgatctcgatgcctggcgcgacaatttcctgcgcgacctacgtgccttctcctcccgtccgcgggcggaagtcccgtccaacccgctgtttaccgtctgaacctgtgacgcaccggtcgctgtgcttgtcataatgccgaccggttcgtaacgatttggaatggaagggtgggtgatgagcaacgatctgcagcaattaatcgagaacaacgcacgttgggccgaagccatcctcgaagaagaccccaacttcttcaccaaactggccaagcagcaggtcccagagtacctctggatcggctgttcggacgcccgcgtacccgccaatgaaatcgtcggcatgttgccgggcgatctgttcgttcaccgcaacgtcgccaacgtggtgctgcacaccgacctcaactgcctgtcggtgatccagtacgcggtggacgtgctcaaggtgaagcacatactcgtcaccggtcattatggctgcggcggtgtccgtgcctcgatgcgcgacgaccagctcggcctgatcgacggctggctgcgcaccattcgcgatctgtactacgagcaccgcaaccatatcgccagcttccccaccgaagaagcccaggtcgatcggctgtgcgagctcaacgtgatccagcaagtggccaacgtcagccacaccagcatcgtccagaacgcctggcaccggggccagccgctgtccgtgcacggctgcatctacggcataaaggatggcatctggaaagacctcaacgtcaccatcagcggcctggaacaactgccgccgcaatatcgcctgcgcccgctccggccggtctgatgccgactcgtaacgcttgggcctttggtggcctcctgctcgccgtgctctgctggagtggcaacgccctggtggcgcgcgcctttcacgatgccatcccgccgctgaccctggcgttctggcgctgggtgcttgcaaccggactgttgttgccgttcgtggcgcggtccatctggacccatcgagcggcgttgcgcgcggcaggctggcgcctgcccatcgtcgcggcgttgggcatcagcagctataactcgctgctgtattccgcggcacaaagcaccgaagccatcaacctgacgctggtgaacacctgtttgccgctgttcacctttatcggtggcgggctgctgctgggggaatggccggcgcggcgtgcctggttcggcatggccatcgcggcgggtggcctggtctacctgatcagccgtggcagctgggtggcgtttaccagcctgtcgttccagaccggcgacctgatcatgctggcggcggtgctggtgtgggcgctctataccctgtccctgcggcgctgggccggctttctgcaggtgccgccgctgacgctgctgggcgtgctgatgttgctgggcacaccgctgatcctgccgttctacctgttcgaattcagcaacgtcggcggcttcacgccgaacctgatcaacctcagcgtgatcgcctacaccgccattttcgcctcgctggtcgcctacctgtcctggaaccacggcgtcaaaaccgttggcgcggcgaaagcggcgatggcgacttacctgatgccggttttcaccgcgattctcggctggctgctgctgggcgagggcctgcagagattccactggattggcggtgggctgatcttcgccggcctgctgttggcgacccggcccaccgtgcgccgggcggttcgctgatgccgagccggaatacctgcagatagcccgcttcggcgcgatgctgttcacttagtaagttcgcctcgagtcgggcctccacccaagcagcaggagcacaccagctccagtgggaggcgcggcctcgcggcgatacaggccgcaggcctgtccgaaacgtagacgtgcctgagtcgacagtgttcaagtgaacagcattaccgcttcggcggcgatgtccggttacttttctatcgtcgtgtcgttcagcgcttgctgttgccgcacaccatctggcccttcatggcctcctgcttgacgatgaattcacccaccaacgggcggctctgcagatagtgctcggtggtcttgtggtgcgcgaacgccgcttcgtcgcggtacagctcgtagagatagacgaggtcgggatccgccagatcctggataacgtcgaacaccaggcaatccggctcccgggttaccgaagcggcggcattgacgcgcatggcctccatgaacttatcgaacgagcccggcgcaagttgcgttttcaggataagacagtacatgagcattccattttgttttaatcttttcgcgtaattgtatacaagaaggagagagaaaatgccacagcgtcccggtcgcctgaacggcctgcgtcatctggcgctcaccgtgccgaaccttgaagaatgcgaacgtttctacgtcgacgtgctgggcatggacgtcctcaatcgcgccagcaaggacctcgtctacctgacctgcggcaacgacaacctctccctgggccgcgcccgggaaaagagcagcggcgtccaggcgatggatcactacggtttcatcgtcgacagcctggaagagctgcacgcctggtacgaatacctccaagtccaaggcgtcaccatgctcgaccgccccttcgcccacagcgacggcgcccatagctttcacgtgctcgatcccgccgggaacaccgtgcagccgctttaccatccggcgatatcggggcagcgtttgcggtgatgaacaatgggtgagctttgtagctgcgttggccggatggccgcgagctaaaaaaccaaagcgttcgatccagcatctgcggccggttcggaccgtctgggacaatgaacgagcgtcattgcggcactcgtcgcagcgtggccggacgggtcaggtgccggagtggccggcctcgctctgctcgatgaacaggcttggtgctggttgcacgctttgtaggagcgctggcgggatcacattcaccggcactgcctccggcacgatttccaccggtatcgcctggggctcggccaccggcgaattcttccggcggtactcggcgaagaggatgagaagcgtcaacgtcagctcgcagatcacgacgatcactgctggcgcgatcaacccgaacaccgggatgaagatgcagttcagtgccacgctgagcagcccgcagaacacacgcatcttgacgaagctgtcgtagcgttcctcggcgacccagtacatctcgaaaaccacgtttacgagtcggaagataaagaagcccgccatgatctgcaggatcagcgaggcgcccgcataactttccggatagaacaagtggaacagaagcagggcgaatacctgatagcccgcgaacatgcccagcgacaggccgaccgccaggatgacgaacttccgctgcccgatttcgttgaagccgcgcgatatgcgaggcatgtacagcgaccagaacgcggtgacagcgatctgcccgatggcgataaacgaaacggctgcggcatagaccgccaactgctcaccaccgagcagcttctcaatgacaatccggtcggcaccgaagtaaagaaagaaggagaaaaaggaaacggtaaagggcagccaggaacgccacagggtcagcatcttgccgagcgtcgcgaagacctgggtgtcgatggcgaagaagcctggttggcgaatacagcgcaggtagaaccagcccaggtatgaaagcatggccacactggcgccaacggcgacggaaaggatcaggttaccggtaagcaggaacaagccgatctttacggcgaagggcagcgacttgaagatcgaatccagagaggagaagcgcaccagccggtcctggcgctggtagtggaagaacaggcagcgctgcagaacggcgaaggccagggcttcgggcaaaaagctgaccagcaggtaataggcatcgtgcgtgccgccgacattgcccaggtagaacatggccaccatgaccaggaccagatagcccacggtcgctggcaggaaaaggttttccccgctggaaagccccttgtcgatggcgcccttgctcagcaggtagtcgcgtaggccgagatcggagaacccgacaatcaccgataccagcaccatgcttaacgccagcgagccgtactcttccagcgagcaatgcttggcgaccaagatcagaaaaaagaaattcaacagcggctgcatgaccatcggcaggaaaacgaaagcgatcttgccgatctctttatcgaatttcttcttcatacacatcctttgtgcgcggctggttcagacgcggcgaagttgatgccaacggtgcgtgacgacgaggaccggctccctttcgccataacgcctggcgggttgggttgcgcgacccttgcttcgaggtgaacagaaaacgttgcaggggaacgctgcggtatcgctgaccacacactcaaacccaactgccaaaaaaactgaccaccacaggcgccgcgcaggcgaaaacggctgtgcacgcgagaacgctgggtacagacaatcagagaaatatgtgggcttctagaatcctgctggaagcagaccaatgttccaagaaccggaacaacgacggcgacagtatgcgccggttgatggtagaggcaactgccatctatcgacccgggcgggggccacaggcactgcgagcttagccggccggccggtctctcaagggtgcggcaatacgccgtcagtgtctgctcagcatgattgggcttcaggtcaaagaagagtctggcgcggcagttgagcctgaagattatccgtgtcagtgctgaaccctttcttgagttggtggctactcagggacttgaacccaggcccccagcattatgaatcacctgcactcggcctcactgccccagaaaagcccataaaacggtgcctacaacagcctgtaaacctcacctgaacagagctttccagaaaaagcgctaatgtagtctccttgtccagtgctccagactctgtctatgctgcatgattatggcaaagtagtggctatctgctcgtgcatcgttagaaacaaggctagactgccttagtaaagccctacctctagcacggttcattaagagactaggcactattttgtttgactggctttcatgattgtttattgttaataaaattacaacttcataatgtaatcttggcaaaggtattttctatgactggggataaatcgtcttatttcaaggaaatttctggctggaagctcgatgccaagcttgaagacaatgataggtacttctatttagcttcagacgttgagtctcttttacagggtgagcgcgcatatgttattgggcgtaaaggtactggtaagactgctatagccagttttattaagaaaaagagggattatagtcattttgcgattagtttaactttgaaaaactttccttttaatcagctatatgcattttctgatagcagatatacctcgcctaatgagtatattactatttggaagtatattgtgtatgtgaatcttttatatttgatggtcgataatgaaggggttgatgccgttctcaggtccgccgttaagaaggttatgccttgtgatcccaaggctgcgttgtctcgcaagttaaaagtgtggacttctgcagcatttaaccttgggtttagtgagttctctgctggtgtggacctttctcgtacgtctgagagtgtggatttaaattgggtagaaagaacgcaggttttagagcaaattatttttgaaaagattgacacttcttcgtactttatactttttgatgagcttgatgaggattacaagtatcaatcaatatttggtgagaacaagcagtatcttgaccttgtttctggtttgtttaaagcagttcaagatattaagtcaataagtattgagcgcggcgttaatgtcaatccggtaatatttttacgtgatgacatatatgatcttattcaggatcctgataaaactaagtggggggacttggcagtagagctcaagtggaataagtctgaaatgcagtcgttaatagcgcacagacttgcgagagcggctggtgcaaatgctaaaaaggtttactttggtgagacatggaatgagttttttgctagggagggtattaaggtaggtgtaggtcgagagaaagaaatttctatttatgattggataactaaaaatacgcttttgcgtcctagggattatattaagtatctacagttgtgtgcaaagaaagcctatgaggctaactataggttagtaagagcgtccacgttaacaatgcaggacataacttattctagttatcttcgtggtgagttggtagacgagattcatagcattcttcctgatatagctgctatctttgatctgatttcgaaattaggtaaagcgcatttttctgttgatgatttttctagtgcttatcagaaagcctatgactcgggcgttgttaagaataaaaactatcagtatgtgttaaacattttgttcttttttagtgttgttgggaatcatttcggcgacaacaagattgtttttaggtatatgaatcgtgaggctagcttaaatctagattgcgcgttagtcgttcatagagggttgtataagtctcttcagttgttttagatgttctctttatctaactaaaaggatgattaccaattcttatctcttaaaccctcggtgcactccttcacgtcatcatcgatgacgttcccaggcttgatgcactccttcatggtgtgccgaaccccgcgattggcttcgcgttcgcgggcagcttcgcccatggggcctttggaaccagcgaagaacttgttcaccagttcctgcgcacctctgccgtaggcttcggcagcaggccgcatcgcatcaccgccctaggtggcaatgggttttgattcgtcagcgagggcagggcttgagactagggccagtgccagcaaaatccgtttcattggtcttctccgttccttcgggcgtaccagcgcctagctactttaggcattaaggggacagatttattttcagaagacgacgcgctccagtacgagcgcagcaacgctgtttagccttgcttacccacccaaggcgcaacgccatgaaacaccaccgctggtagtcaccgcatattcaaatgactccaacaggctctcttgacctctgtgctttaacctcgattagcctttcactctcgagcggggttgccaatttttatatcgcttaaacctatattatataaagccttgaagtttttttcggttctttcctttattttttcagtttttctgtgatcagccagccagtcataattatgtttgaattcgccatcttctaatatccattgctttgtgaggccaaataataaattgactgcataaaaggtgttaaaggtttcttgtatgtcttccgggcttcttcctggcatttccctcggaaaaaccccgtcttcataagctttatctgcaaatgtcgataaatgtttaagccagagctcttgatataatcctgagtttcgagttttgcaaactccggtccagcaaaagaactcggggttttttagtttatcaaggcatatcgcgatatagtgagagaatacgaatctgatagttaggttttctgctgggtatttaaaagttttatattgtgaggctagctcttgaagcgatgcttgcgtgtcgtgccagtggtttatttttatgagcgcgttatagtggttttcgagtccacttccttttgttaatatttcggttgcccgaatgtactcttcttttgtgtagtttattattgtcttttgtagttccgagagattttctttagctgcatggcaaaggtttaagaatctaaagtttgggtcgcaatcttcaataatgttttcaacgttcttgaatttgaatggaaacccttctgatgcattaagtgccaggtcgcagattaaaaggaatattgctattgatggttcgccaatatgcatggcgtttttttcgactatactttcaaaggttaagaatgctttcccgtagtggccatccaaatagccctgctgtgagatatctttaattgtcaagtgttcgcttgaaaggaatgataaaaattgaagttgtatgaatcttgcttggccttctaaaatgtctatgccagaaattggcgggacaattatttctgatccgaaataaaatccagttgcttttctatttctgagattgtttagttcttcatagtagtcgtcagggttagggatgaatttatactcagggtctaccgccgatgatattaaagagagcacggtttcataagcgatggtgaagctgtgtcctatgctttcaaagtagttgcttgttgctacggtgttaagctccatcggcttcattgtgatgtagcgataataatcgaggtcaattgcgtagttagtagcgatgtttgcgagtcttactcgctcgtcggtatggtcaaggccgctaagcattgctttttcagcccacgcctttattggttttgatacttccttgtacttccctagcagttgtagggagtcaaaagttttatgtgtttgtgctggatagcataaggatgtgattaatccgtgtgtcgtacctatatgttgccaccagtgcacagtttcatgcaggtatgtagagtaagctacgagttcgtcgttggtaatttcgttaaggtctttgtttgtggcgctgtctactttctcatgcacaagcgggctaagtctaagaacaaatccttcaatctcgtaaaggccgtgagcgccaagacaagctgataaactattcggaggtgaaccgggctcattggctggcaagtccattaaatgggtggttagtgtaattttctttggtgcgatcatggcgggctcttgctaggtcctggtaactaatcctcaaaaagctctccataatcaataggatttcctagatatctttgagtttgaggtcggtgcggcggcttcgcctattacgcgtccagatccgacgaagaattcgtacaaggcgggttatggtgttcccgtaggcttcggcagccggccgcattgcatcatcaaccttagaggctacggtttttaattcttcagcgagggtagctttggggctatgccagcaaaatccgtttcattgatcttctccattgatttgggcgtatcagcgcctagatattttcaacgctatcgatgtttccgttttcacggaaaaggggacagatttatttacagaagactatgcgttctagcagcggcgcggcaacggttgtttatccctgcgtcgctgcccacggcatgacgatctgcaaatccccaacaagcaactgcgccgcaactatccaaaccatcgcaccaatcacccccaacgacagatggccgaccacgatgccaatggcgatctgtttccacagcccggcatgttggttagtttgggtagcggcggtgcgatagggtgtttcgcgctcggcccggatgttgtcgaattcgtctctcatggtgcgctctcggtgcggttggctaaacggcgggcacaaaaaaagggttcagctttcgctgaaccctttcttgaatttggtggctacgcagggacttgaaccccggaccccagcattatgaatgctatgctctaaccaactgagctacgtagccaagtggcgcgcattattcgcgccgcgcggttgtgtgtcaaccctcctggtgcgctttttctaccttctttttcaaaagcttatgccgtcggtccgaccgctgccggtgcgctgtcgctcaatcccatttcggcgcgaagccggggttggccaagcgctcgttgcggtccagcgtggcgatctgttgcatctcctcgtcggtcagtcgcagctgttgcgcctcgaggttggcggcgaggttttcgcgcttggtggaggaggggattacggcgaagccctgttgcagcagccaggcgagggcaacctgcgcggggctggcgttgtgggcttcggcgatgcgttgcaaaacctcgtcctgcatcaccttgccgtaggcgagcggcatatacgcggtgatgtggatgccgtggctgcgggcaaactcgatgaccttgcggttctgcaggaagggatgcacctcgacctgattggtggcgatgttctcagcgccaatggcgtcgatggcctgctgcatatggccgatggtgaggttggagatgccgatcgcgcgggtcaggcctcgctgcttggcgcccatcatccgggcttggtagtcggcgacggccagctcgtcatcgggcgacggccagtgcaccagggtgaggtccacctgctccatgcgcagtttgctcaggctttcctccaggctggggatcaggcggttggcgccgaggttgctggtccaaatcttggtggtcacgaatagctcttcgcgcgggacgccgctctcggcaatggcctggccgacttccgcttcgttgtcatagatctgcgcggtgtcgatgtggcgatagccgagttcgagacccatcttcaccgagtcgatgacttgctgacccttgaggcgaaaggtgccgaggccgaatgcgggaatggtcattgagggttctcctgtgaggttctcttagggtgtattcaatgcgaggcggtaagcgccggctcgtgagtatcggtacctgggttatgtgctggcgctgcagcgaatttgcgatccagttggccgctccagtaggtgagcgccagggcaaccagcaccaccagcgagccgatccaggcggtatggatgagacccatggaggcgacaatatgtccgccgagccatgcacccccggcaatgccgagattgaaggcggcgatgttcaggcccgaggcgacgtcaacggcgttcggcgtgtagtgctcggcctggcgtaccacgtagacctgcaggccgggcacattgccgaaggccacggcgccccagagcagtacggtggccaatgccaaccaggggttgctcgcggtgaaggtaagggtcaagagcacgacagccagcaatgtgaagatcagcttgagcgcactgatcggcccgcgacggtcggccagcttgccgccccagatattgcccaccgctaccgagacgccgtagatcagtaggaccaggctcaccgcgccttcaccaaagccgctgatctcctgcaggatgggcgcgaggaaggtgaacgcgataaaggtgccgccgtagccgacagccgtcatggcgtaaaccaacagcaggcgcggctgtttcagtacggccagttgctggacgatggacgccggcttgctgtgctgtatgccgcgcggcacgaagagcaggctgccgataaaggcgatcacgccgagcagtgacacggccagaaaggtctcccgccagccgaactgctgaccgatgaaggtgccgagcggtacgcctgtcaccagcgcgacggtgagtccggtgaacatgatggcgatggcgctcgcggctttctctttcgagaccaggctggtggcgatggtcgagccgatggagaagaacacgccgtgggcgagaccggtgacgatgcgcgccaggatcaacgattcgtagcccggcgcctgccaggccagcagattgccggcggtgaacagcaccatcaacgacagcagcaacagcttgcgcgggaccttgccggtcagggccgtgagcagcggtgcgccgaccgcgacgcccaaggcataaagactgaccaacagcccggccgagggcaggctgacaccgaggtctccggcgatggtggggatgaggccgacgatgacgaactccgtcgtgccgatggcgaatgcgctgagggtcagcgcgagcagagcgatgggcatgggttgaaactctggttggattgcatggcgcgcagtgtctaccgcagactcatgcggaaaaaccgggtctcaggccaaacataattgactgcgagtcacagatgaaaaccacgctcgacgagttgcaggccttcacggcggttatcgataccggctcgatttccagcgcggccgtgcagttggggcagaccgcctcgggcgtcagccgtgcgctgagccggctggaagccaagctcgccaccacactgctgcgccgcacgacacggcgcctggagctgacggaggagggcgcggcttttctggttcaggccaggcggattcttgaggccgtagaggaagccgaggagcagatgtcgcgccgcttgcaacggccggccggaaggttgcgggtcaacgcctccgcacccttcatgctgcatgtgctggtgccgctgataggtgggttccgcgagcgctatccggatatcgagctggaactgaacagcagcgaccagatcatcgatctgctcgagcaccgcaccgacctggcgctgcgccacggcccgttgcgcgattccaccctgcatgcgcgtccactgggtcgcagccggattcgtgccgtggccagcccggattacctgacacggcgcggcatgccgcagcaggtagaggacctggcgacacatagcctgatcggcttcacccagccggagagcctcaatcaatggccgttgcgtcatccgctcggcgagacctggcccatcgtgccgagcctgtgggcatcgagtggcgagaccgttcggcatctggcgctggccggccaaggcatcgcctgtttgtctgatttgatgactgagcgggaccgcgctgagggcacgctggtcgaagtgctggccgaggcaaacacccgggtaattcagccgattcacgcggtgtactaccgcaataccgcgctcgccgcacgcatcacctgtttcctcgactacctgagcgagtgcctgggcgagcaggagtggacacgctaggtggtcacgctagagacgggcgggccgaaccatgcaagcccgggcctgcctaacgcagcaggcacacctgcgaggtaaccatcatgctcagcattacccttccaagcgatccgccgctatatccgtggctggcggacgaatcgccgctgaacgacctggatgacgccgaaagtgacaccgaactggacgacggcgacacactgcccgacgaagtgatcgaacaactggaaaaagagccgccaccgccggatccgatgcctgaccctggcgtgatgtagcggtccggttgggcttatcggcgtgttcggcaatgctgagtcattgtgagagcgcaccgatgagcggatttttcccgatagggcatgtcaggtgcagctataaggctgagtgtgcggccttgaatggcgatttgcgcgcctgccgcttcagatgcggcgcgacgcaggctggcgtcacaccgcgacactcgctgtgccaggcgccgaatcgactctccccatgatcgtcgcggctgcaccacgcggcggctcgtaatcgtgttcgggcgacgattctcaccaaggccgccggcctgcgcgatttccatccgctccccatgcagccgcacccattctggtgcgggacgccggtgtagttcccttgggctgagcgcgtcaccacttctttcgatttccctacgcagcttgctggctgggtgcgtaacaatgctcttcctttgctcgcgagacataacgcatgaacagacggttgttggttgtcgtgctgctgattggcttgcacgtgtttgtcggcgtcacgctgatcccggatctctcgctcggattggtcggaagcgtcctggcgtgggtctatctcgcgctctcagccgtgctgatgcgctatggtgtgctcgtgcgtgggtcaggcagcaccttgctcgcctggtctggtttgctgaccatggggattttttccagcctggcggtctttgcgctgctgcgtgcttttgcactggcgctggcatcatcgctcggctgggagccggctggtcttgcacagggctctgcactggtcgttatcgctgcggtcgtggcggtaacgctgttcggcttgatcaacgcgcggcggacggcgcgcgtggtcgagcgtgacattgcattacggaacctgcctgcagcgctggcgggattcagcatcgtccagctcagcgatatccatgtcggtccgacgatcaagcagggctatatcgatgcgatcgtgcaacgggtcaacgggctgtcgcctgatctgatcgtcattaccggcgatctggtggacggcagcgtcgccgatctcgccgttgacatcgccccgttgtcacagctgagcgcccgtcacggggtctacgtggtgaccggcaatcatgagtattactccggtgcggacagctggatcgctgaattcgagcggctggggatgacggtgctgctcaatcgccatgtccagctcgagcacggcgatggcaggctggttctggcgggcatcgccgattactcggccgaactattccggcccagccatcgaagcgacccggtcgctgcgttagctggcgcgcctgatgacgtaccgcgcatcctgctggcgcaccagccgcgttcggccaaggccgcggtggaggcgggctgcgatctgcaattgtccgggcatacgcacggcgggcagttctggccctggatgcacttcgtgcgctggcagcagccgtgggtggcggggctgcagcgcgtcggcgagatgcagatctacatcagccgtggcaccggctattggggcccgccgctgcgcttcggcgcgccgtcggaaattacgcggcttcgcctggtcagtgcgtagcgtctagcagcaagccgcgacatcagctcgccagcagctctcgacgcagcagcacgtagtcctgaccttcctgctgcccgcggcgcaacgggttgcgtgtgcagtgcgcggcgaaacccgcgtcgacgaaacggtagggcaggtgctcgtcgcggccggtggggatgccgagacgcttggtctggacgatgtccgggcgggcgccgatgtcgtccacacgcaggcgggtcgggtccatgcgctgggcgttccactccgttaccgtcaggcccagcgccttgcacagcagtgtctggccggagcagaggcgggtgagggggcgtgggccgccagcggcagccgggctgttggtgcgcatgcgctcgatggactcttcgcaggagagcgagtcgatccaggggtagccggccttgatgcagaccgcgttgccttcgccctgcacgctgaaattcagcgagtccccaccgcgtgagtagtagagataaagatggccggccggcatgaacatcgcccgtcgcgacgggctgtaacccagtgatgaatgactggccttttcatcgacgtaataggcctcggtctcgatgatccgcgccgacagccaaagcccatcgacgcagtgtcgaatcacggtacccagcaggtcctgagcgacgatctgcgcgtcccggttgaaaaaagcgtcgtcgagatgctgtgtcgggatttcggtgaggctgttcatcgctgctccggcttcggcaagtctgcctgttccgaccgcataagcggggcgaatattccgcaggaaatggatagatcacgtgccggtcgtcagacgaacgcagtgaatcaggacggttcggcttcacttccaatgattccccgccggaatgcaagaagccccgcggataggcggggcttcttgagctgtttcattcagcgggcgctaatacaggcagggcgctcagacattgaagcggaagtgcatcacgtcgccatccttgatgatgtattccttgccttccaggcgccatttaccggcttccttggcgccggcttcgcccttgtactggatgaagtcgttataggcgaccacctcggcacggatgaagcccttctcgaagtccgtatggatcacgccggcgccttggggggcggtggcgccgaccttgacggtccaggcgcgaacttccttcacgccagcggtgaagtaggtctgcaggttgagcagctcgtagccggcacgtatcacgcggttcaggccaggctcctcgaggccgagggattcgaggaacatgtccttttcctcgccatcgtccagctcggcgatttccgcttcgatcttgttgcacacgggtaccacaacggcaccttcttcggccgcgatggccttgaccacgtccaggtgcgggttgttttcgaaaccgtcttcggcaacgttggcgatgtacatcaccggtttgctggtcagcaggtggaagcccttggccagctgcatctcgtcatcgcccagctttttcaacagggtgcgggccggcttgccttcggtgaaatgcgggatcagcttttccagcagcgccttctgcgcgacggcttccttgtctccgcccttggcgttgcgcgtgacgcgctgcaactgcttctcgcagctgtcgaggtcggcgaagatcagctcgagttcgatgatctcgatgtcgcgcttgggatcgaccgagttggagacgtggatgacgttctcgtcctcgaagcagcgcacgacgtgagcgatggcatcggtttcgcggatgttggcgagaaacttgttgcccaggccttcgcccttggaggcgccttcgaccaaaccggcgatatcgacgaattccatggtggtcggcaggattcgctccggcttgacgatctcagccagggcctgcaggcgcggatcgggcatcggcacgatgccgctgttcggctcgatggtgcagaaggggaagttttccgcagcgataccggatttggtcagcgcgttgaacagggtggacttgccgacgttgggcaaaccgacgatgccgcaattgaatcccatgtgtcttgcctcggtataggctggcagcgattacgctaccggcgatgccaaactgcgttaaacggcttcgtgatgcgctgtgtgcaagccttccgctcagccgttgccttgtcttgcgtttctgcgtcgagctcgatcaggccttctggctgtgcagacgctgcattgcacgcgtccagtcaccggcaagaatgtcgggcagcacctcgagcgtgaagtcgatgctggcgtccagcttctcgcgttcggcctggggggctcggcccaatacatagccggtcaccaggctgctatggcctggatggccaatgcccagacgcaggcggtagaaattgttctgattgccgagcttggcgatgatgtcgcgaagcccgttatgcccgccatggccgccgccctgttttagcttggcgatgccggggggcatgtcgagttcatcgtgggcgaccaggatggactcgggaggaatacggaaaaatccggccagtgccgccaccgcttgaccgctacggttcatgaaggtggtggggatcaacaggcggacgtcctcgtcctgatggcgaaacttgccgaccaggccgaaatacttgcgatctacgctgagattggcgctcttgtgggcagccagccgctcaacgaaaagggcccctgcgttatgccgggtctggtcgtattcagggcctggattacccaggccgacgatcagttttacggcagtcacgacagaggcccttcctcaggtgatgacgagtggattactcggcagcgccttcttctttcggagtgtcttccttgctcacgcgaggcgcatgaacgttggcaaccggcaggtcactgccgtgggccagcgagaccagctgaacgcctttcggcagggtcaggtcggtcatgtgcagcacctggccgacttcaaccttggccatgtcgacctcgatgaactccggcaggtcctgcggcaggcaggagacttccacttcgttgatgttgtgcaggatttcgccaccctgctgcttaacgccaaccgaggtttcctggttgatgaagtgcagcggaacggtagcggtcagcttgtgaccttcgacaacgcggacgaagtcagcatgcaggacgaagctcttggctggatgacgctgcagcgccttgatcagaacggattcgttctggccatcgacgttcagggtcagcacgtggctgaaggaggcttcgttttccagcatcttggccaggtctttggccagcaggctgatggactgcggggccttgtcgccaccgtagattacggccgggacgaggctggcgttacgacgcaggcggcggctcgcacctttccccaggtcggaacgcacttgggcattcagggtgaagtcagtcattgtgtttctccaggataacaacgcacccgaaacgctcgcgaccagcgctaccgggcggttgggcaaaaagccccgcacgaggcggggcacattttcgttctgcgcgaagggctaagcgtttggcttagcggaacatcgcactgatcgattcagcattgctgatgcggcgaaccgcttcagccaccattggcgcgatgtccaattggcgaatacgggtacaagcttgcgcggcggccgacagcggaatggtattggtcaccaccagttcgtcgagaaccgagccttcgatgttctcgatggcgcgaccggacagaatcgggtgagtgcaatacgcgaagaccttggcagcgccatgatctttcaaggctgttgcagcgtggcacagggtgccggcggtatcgaccatgtcatcgacgaggatgcaggtacggccttcgatatcaccgatgatgtgcatcacttcggactggttggccttagggcgacgcttgtcgatgatcgccaggtccacacccagcgatttggcgacggcgcgagcccgcaccacaccgccgatgtcgggggacacgatcatcaggttctcgaagcgctgagcctggatgtcatcgaccaggaccggcgagccgtagatgttatccacgggcatgtcgaagaagccctggatctgatcggcgtgcaggtcgaccgtgaggacacggttgacgcccaccacatcgagcatgtcggccacgaccttggcgctgatcggcacacgtgcggaacgcggacggcgatcctgacgggcgtagccaaagtaggggatgacggcggtgatgcgggtggcggaggaccggcggaaggcgtctgccatcacaaccagttccatcaggttatcgttggtgggggcacaggtcggttgaatcagaaagacgtccttaccacgaacgttttcgttgatttcgacactgatttcgccgtcggagaatttcccgacgtaggcgtcaccgagagggatatgcagctgacgtacaacacgccgggccaggtcggggttggcgttccccgtgaagaccatcatcttggacacgcgcagtacctgcctgagggtggatccgatgaaacaaaaagctgttcaaaaggccaggcattttgaacagctctcgtgatgtttggcaggggcggctggattcgaaccaacgcatggcaggatcaaaacctgctgccttaccgcttggcgacgcccctgtagattcaatgtgcttgctgctgtaccaacctcgagaggttatggcaggggcggctggattcgaaccaacgcatggcaggatcaaaacctgctgccttaccgcttggcgacgcccctgtaacgtacaacctgatgctagtcactcacttcctgcgccagttgcgcgagccttcggtgcagcatcgaaatgttgcggccttgagctacgaaagctggtaaatcggctggaagttggcggcaaactttatcagcctcacctttgtttgggaagctcccaaacacacaagctccagtgccggtcattcttgctggaacaaaattgttcaacaagctcaaagcgttacggacttccgggtaacgcttctcgaccaccggctgacagtcgttatgaccgccccctgcaagaaggctgcgaactgtaatggccggggtattgcgtgtcaactctgggtcggaaaatatttccgctgtacttacagagacttgcggagcgacaacgagaaaccaaggctcgctgagttcgaccggttgtaggcgttcgccgactccttcggcaaaggcggcgtggccgcggacgaacacggggacatcggcgcccagtgacaggccgatctcggccagccgttcttctcccagatgggtctgccagagatgatcgagccccagcagagtagtggctgcgtcggagctgccgccgccgatcccgccgcccatgggcagacgcttgaccagctcgatatcggcgcccagcgtgcagccgctatgacgttgcagcaggcgggcggcgcgcacgatcaggttgctgtcgtgatcgacgccgggcaaatcggtatgcagctgaatctcgccgtcggcgcgcggcgtgaagctgagctcgtcgccatggtcgagaaactggaacagcgtctgcaactcatggtagccgtcgtcgcggcggcctaggatatgcagcatcagattgagtttcgccggggccggcaaggtcaagctgcgcatcagtgaccgagccggcgtggctgccagtccttgaccaccagcgtgatctgcaggtctcgaccgaccagcttgatgcgtgacggcagggcgaagccgttctcgtcgctgtagtcgagatactgcacgtcccagccgtcctgttggagatgggcgaggcgaccgttgccatccagttcgacatggctgcggctgtcgggggcgggcaggccgcgtatccaccagagcagattcgagaccggcagctgccagccgagttggctttccaccagcgcttccggcgactcggcctcgaagcgcccctggcccgccacttccagcgagaccgcatcggggcggccggtcaggcgcgtggcgccgcgccccagcgggccggacaggcgaatgtcgaaatagtcctggcgctgcagccagaacagggtgccgctgcccgagtcctggggcgcgcgaatgccgatcttgccgttgatttgccagccgtcgatctcgctgatctgcgccttgtgggtcttccagtcctgggcgttacccgggccctcgacggtctcctgggaggcaagaccggcacagccggccaacagcacggcgagggtgggggccagcaggttgcgcatcagcttcatgggtcagggtttctccgagccggtcaggcgtttgatggtttcgtgcaggacctcgctgtccggttgctgcttgagcgcttcgccccagatgcgacgtgcttcgcgctgctcgccggcggtccagaggacctcgccgaggtgagcggcaatttcgtgatccgcgaagcgctggtaggccttgcgtagctgggtttcggcctcttcgagattgcccatccgataattgacccagccaaggctgtcgaggatggcggcatcatctgggttgatctgataggcctgctggatgagcgcaagggcctcatcgtagcgggtggtacggtcagccagggtgtagcccagcgcattgatcgccatggcgttgtcgggttcgcgttcgatgatgaacctgaggtcctgctccagttgcgccaggtcaccgcgcttctcggcgatcattgcgcgggtgtaaagcaggttgaggtcctcggggaactgctccaacgcctgctccgcccgctgccaggccgcttcggtctgtccctggttggacagggcttcgatctcgatgagataaagctgaatcgcgtaatcgggctgctcttcgcgcgcgctggccagcaactgtgacgcgtcctggttacgcccaagcgagaacagcagctcggcctgcatcagctttgcgggcaggtattcgttgcccaggccgaccttggcgaatgcggcgagcgccttttcgtgctgacccaactcgcggtaggcgcggccgagattgaaattcgcggcatctaggtggctgccgcgctcgatgagttcttcaaggtaaacgatcgcttcgcgccaggcctgcgcttcgaggcacaccagtgccatcgagaagcgcaggtcgtcgtcgcccggatgctgctggaccagggtagcgaactcacccatggcctcgtcgaggcggtcctgctcgaccagcagtcgggcataggtcagccgcaggcgtttgtcttcagggtgctggcgcaggcttttttcgagcagcggcagggcttccttgctgcgctcgagaatctgcaacagccgagcttgcagcaggatcgacgggatctcttgctcgcgcgccggttgctcctcgagcagggcgagcgcttcttctggatggccgtcctgttgcagcagcacggccttgccgaatttgagctgaggattgtcgggatgcttggctaaaagctgatcgaagctctggagcaggccggttcgcgtgtccggatccgtttcggcggctgacagggcgagaaaatcgaagtgcgtgtcgccttgaccctggagcaccttttccatgaaagccagcgattcctcgtagcgtccggcgcgtgccagctgcacggcggcggcgcgctgtgcatcgaggttctccggtgcgttgttcgcccagatcagtgcggtatcgagcgccgcctggtcggcaccgaggtattcggcgatgcggaagccgcgctcggcgacgccggcgtcctgggtcgcgttggcctgctggacgtaattgcccagggcgatatcgaagcgattgcgttgcccggccagttcggccaccagcaaagcgtaaagggtgtcactgctgaacgagccatattcactggggctggctttcgccgtcgctggcgtagcctcctcgacgggcgggccgctatcgggagcgctctgcatgaagctttggcaaccaccgagaagcagcacggcgctgaacacgaggagttttttcatagggaatataaggctgtctgcggtcgcggcatgatgacacaagctatcaggcaagcccatggggatggcgttgccatgcggatggatgactcgaacagggtacagacaatgaccggcaacggttgttctggagcaggcgaagtaggagaatcgcgcgctccgtttttcgaatcagcgaccctgcatggctttcatcgcgcttggcattaatcacaagaccgcatcggtggatgtgcgcgagcgtgttgccttcacgcccgagcaaatggtcgaagcgctgcagcagttgtgtcgcgttacgccgacccgtgaggcggcgattctgtcgacatgcaaccgcagcgaactgtacctggagcaggagcaggtcgaggccgaggcggtgttggcctggctggccaactaccaccggctgaacctcgaggatctcaaggcctgcgcctatgtgcataccgatgaccaggcggtgcagcacatgatgcgtgtggcctcggggctggactcgatggtgctgggcgagccgcaaattctcgggcagatgaagtcggcctatgccgtcgcgcgtgaagcgggaagcgtcggtccgctgttgggacggctgttccaggcgacgttcagcacggccaagaccgttcgcaccgatacggccatcggcgaaaacccggtgtcggtcgcctttgccgccgtcagcctggccaagcagatcttcgccaacctgcatcgcagtcaggccttgctgatcggcgccggcgaaaccatcacgctggttgcgcgtcatttgcacgagcagggcgtcaagcgcatcgtggttgccaaccgtacgctcgagcgcgccagcgcgctggcggagcagttcggtgcgcacgcgatcctgctggccgacatcccgcacgaactctacagcagcgacatcgttatcagctcgacggccagccagttgccgatcctcggcaaaggggcggtcgagcaggcgctgaaaaagcgcaagcacaagccgatgttcatggtcgacatcgccgtgcctcgcgacatcgaggcgcaagtcggggaattggacgacgtctacctctatacggtggatgatctgcatgaggtggtcgcggaaaacctcaagagccgccagggggcggcacaggcggccgaagagctggtcgctgccggcaccgaggatttcatggcgcgcctgcgcgagctggcggccgtcgacgtgctcaaggcctatcggcaacatgccgagcggatccgcgacgaagaaatgctcaaggcccagcggctgctggccaacggcggctcggccgaggacgcgctggctcagttggcgcgcggattgaccaacaaattgctacatgcacccagcgttcagctgaaaaaactctccgccgaagggcgcgtggaagccctgggcatcgttcaggagctgttcgccttggacagtacggacaaaacatgaaagcgtcactgctcaacaaactcgatatcctgcagtaccgcttcgaagagctgacggcgctgctcggcgacgccgaagtgatcagcgatcagacccgcttccgcgcctactcgcgcgaatacgccgaggttgagccggtcatcgccacctatcgcgaattcctcaagatgcaatccgatctcgagggcgcgcaggcattgctcaaggacaatgacccggacgttcgcgagatggccgaggaggaggtgggcgaagcccgcgcgaagctcgaagagatcgaagcccggctgcaacgcatgctgctgccgaaagatcccaaggacggccgcaacgtcttcctcgaaatccgcgccggtaccggtggcgacgaggcggcgattttttccggcgatctgtttcgcatgtattcgcgctatgccgagcggcagggttggcgtgtcgagatcctgtccgaaagcccgggcgagcacggcggctataaggaagtcatctcgcgggtcgaaggcgacaacgtgttcgccaagctcaaattcgagtccggcgcgcaccgcgtgcagcgcgtgcccgaaaccgagtcccaggggcgtatccatacctcggcctgcaccgtcgcggtcctgccggagccggacgagcagatcgccatcgagatcaatccggccgatctgcgcgtcgacacctaccgcgcctccggcgctggtggtcagcacatcaacaagaccgattcggcggtgcgcattacccacatgcccagcggtatcgtcgtggagtgccaggaagagcgttcgcaacacaagaaccgggcccgggccatggcatggctcgcggccaagctgcaggacgtgcaggacagcgccgcgcacaaggaaatctccgatacgcgcaagctgctggtcggatcgggcgatcgctccgaacgcatccgtacctataactttccgcagggacgggtcaccgatcaccgcatcaacctgaccctttactcactcaatgaagtaataggcggcgcggtagaacaggtgatcgagccattgctacaggaataccaggcggaccagctggcggcgctgggtgattgaccacggtctgtcgcggacggtgcgtgacgccgtccgccccgccccgtgacgacactgacttaatcccggcatgccgcctctgccatccgggctttacggaagcgccaccatggccaccatcgaatcactgcttcgcactgccgttctgccggactcgccgtccgccaagcttgacgccgaatggctgctggcagcggcactgggcaagccagcgagttatctacgtacctggcccgaacgagatgtaccagccgactgcgaggcgcgtttcgccgcagatctggcgcgtcgtcgtcgcggtgagccggtggcctatattctgggccgccagggcttctggagcctcgagctcgaggtcgctccccataccttgattccccggccggataccgagctgctggtcgaaaccgcgttgcagctattgccgtcgaccgcggtcgaggtattggacctcggcaccggaacgggtgcgatcgccctggcgttggcgcatgagcggccgacctggcgggtgatcggggtcgatcgcatcgccgaggcggtcgatctggcgcggcgcaacgcccagcggttgcgcctcgataacgctgtgttttgcgagagccggtggttttctgcactggctgagcagcgtttcgcactcatcgtcagcaatccgccctatatcccggcacgggatccgcaccttcacgagggggacgtgcgcttcgaaccgagcagtgccctggtggcgggtgatgacggccttgacgatattcgccagatcattgcgagcgccccgaaccatttgctcagcgagggctggctgctactggagcacggctacgatcaggcgccggcagtgcgcgaactgctcgccgagagcggcttcgtcgatgtccagagccgcagagatttcggcggccatgagcgtatcagtctgggctgtcgaccatgattcatcatcgaggagaagacatgctgagcgatgacgagctgctgcgctacagccggcagatcttgctgaaacaggtcgacatcgagggtcagctcaagctcaagcagagccgggtactgatcgtcgggctgggcgggttggggtcgcccgtggcgctgtacctggccgccgcaggtgtcggggagttgcacctggcggacttcgataccctcgatctgaccaatctgcagcggcaggtcctccacgatacggcttcggtcggtgcgtcaaaggtcgattcagcgattgcgcggctgtcgacgctcaatccttcgatcgcgctggtgccgcatcgctcggccatggacgccgataccctggctggggccgtgtccgcagtggatctggtactcgattgcacggataacttcgccgtccgtgaagcggtcaacgcggcctgcgttgcggcgaaggtacctctggtgagcggcgctgccattcgcctggagggtcagctctcggtgttcgacccccgtgtcccaaccagtccttgttaccactgcctctatggtcatggcagcgaagccgaactgacctgtagcgaggcgggggtactgggcccggtcgtcggcatggtcggtagtctgcaggcgctcgaagccctgaagctgctggccgggtttggtgagccgttgatcggtcgccttctgctggtggacgcgctgtccagtcgcttccgcgagctcaaggtcaagcgcgacccgggctgtgcggtttgcggtagtagccatggctgacaacgcgccgatcggcgtcttcgactcgggggttggtggcctctccgtgctgcgtgaaattcgagcgcgcctaccgggtgagtccttgctttatctggccgacagcgggcatgtgccttacggtgagaaaagcccggagttcattcgggcgcgttgtcgggccatcgccaccttcttattggagcagggcgccaaggcgctggtgctggcctgcaatacggccactgccgcagcggtggccgagctgcgcgagcgctacccgaacgttccattggtaggaatggagccagcggtgaagccggcagccctggctacccgcagtggcgtggtgggtgtgctggccacgaccggcaccctgaagagcgccaaattcgcggccttgctggatcgctttgccagtgacgtgcgcgtcattacccagccatgtcctggcctggtggaatgcgtcgaagcgggcgagctcgacaccgaagcgacgcgctcgctgttgcggggcttcgtcgagcccctgatcgagcagggctgcgatacgttgatcctcggctgtacccattacccgtttctcaaaccgctactgaccgagctgctgcccgctacggtcaccctggtggataccggagcggcggtggcgcggcatctcgaaacggtactggcggcccgggaccagctgggtgatggcgcgatgaccacgcgcttctggagcagcggcgatccccgccgattggccagcgtattgcctatactttggggcgaaaacgggagggttgaagcctgccccgtgtaggaactccccgctgcgccagctttctgtatttgaggtaaagctcgaaaacaacaagcgatgccaactttcgataaggaaattccgaatgaaaaaactgatctctctcgctgccgttgtggctgtttcgctgggccaggtagcgaccgcgcaggcgctggatctaaccgcggccgtcggccagactggcgagtcgaccatgacctatcgcctcggtgcgcagctggacttcaaccgcagctggttccagaccagtgtcggccgtgtgactggctactgggatgccggatatacctattgggaaggcgacgaaacgtccagcaaccacagcatctcgctggccccggtgttcgtgtacgagttcgcgggagattcggtgaagccttatctggaggcgggcatcggcgttgccgccttcgagcacaccgaaatcgagaacaatgacctgggctcgtcattccagttcgaggaccgcttgggtgccgggctgcgattcgcgggtgggcatgaaatcggcatccgcgcgattcattattccaacgccggtctgaagaaccccaacaacggtatcgagagctacgcggtgcattaccgggcgtcgttctaagccggcgacgcaatggctgacggcgccgcgccgccgtcagcgttcttccagataggctgaggccgagcccttgcgctcttccaggcaatcttccgagcccagttcgaattcccgacagatcagcggtcgccttgcatagatcgaacagcgcatgctgtctcgatcgagcgctgcacaccagccgtcgtccaggcggcgcatgacctggccgccccaggcgtcctcgtcgatgaagcgctcgggtacgccggtgtcagtgagcaacagtacttcgagccggcaacagcaggctgcacaggtcgagcaactgacgctgtcgtctggtaattggcggtgaggtatcgagggggaggtcatgcccgcagtctacgcgtctggaccggggatggctgctgttgatcagggagccgccagcacgggaccgtgctggcggttgccgtcagctgtcttcttcgagctgcttgttcttccaaccttcgccacccggcaggaggagattgagcgtcagcgcgatgatggcgcacagcgaaatgcccgacaggctgaattcgccaaagccgaaagccatgccgccgatgccgaacaccagggtcacggagacgatgatcagattgcgcgcttcggccaggtccacctgatggcgaatcaacgtactcaggcctaccaccgcgatcgagccgaacagcaggcacaggatgccgcccatgaccggcaccggaatgctcagcaggccggctccgaacttgccgataaacgccaggacgatcgcgaagatcgcggcccaggtcatgaccttcgggttgtagttcttggtcagcatgaccgcgccggtgacttcggcataggtggtgttgggtgggccgccgaacaggccggcggcggaggtcgccaggccgtcgcccaacagcgtgcggtgcaagccgggctttttgatgaagttgtttcccgtcacgcccccgattgccaccacgccaccgatgtgctcgatcgcaggcgccagcgccaccggcaccatgaacagaatcgcgccccaatgaaactcgggtgcgacgaatttcggcacagccagccacggcgcagcgacgatgccggttgtatccactacgccaaaaatgaatgacagtccgtatccgaccgcgacaccggcaagaatgggaaccaaccggaacaggcctttacccagtacggcaacgagcagcgtcgtaagcaaggcgggcatggagatcatcattgccgtcgcgtacggaaccagctgggcgctgccgtctcccgccttgcccatcgccatgttcaccgctaccggcgaaagcgccaggccgatggaaatgatgaccggagcgatgacgacgggcggcaatagtctgtcgatgaaccctgggcctttgaggcgaaccgcgaagccgagcaccatatagacgatgcctgccgccactacgccgccgagcacagccggcaggccgaactctcccttggcggcgatgatcggcgcgatgaacgcaaagctggacgcgagaaaaaccggtacctggcgtttggtgaccagctggaacagcagggtgccgaggccggcggtgaacagcgcgacgttgggatccatgcctgtgatcagcggcatgagcaccagggcgccgaacgccacgaacagcatctgcgcaccggccagcacctgacgtccgagcggctcttccatgggttgtggcatgctcagacgtccttctgcttggtgccgaagatcttgtctcccgcgtcgcccaggccgggcacgatgtagccgttctcatccaggtgatcgtcgatcgatgcggtatagatgatgacgtcggggtgggccttttccaccgcctgtatgccttccggcgctgcaaccaggaccagggcgcggatttccttgcagcccgctttcttcaacatgtcgatcgccgccaccatggatccgccggtcgccagcatcgggtcgatgatcattgccaagcgctgatcgaggtcgtccaccagtcgctcgaggtaggtgtgagcctggagggtttcctcattgcgtgcgatacccaccgcactgaccttggcgccggggatcaggctgagcacgccgtcgagcatgccgatgcccgcccgcaggatgggaacgacggtaatcttcttgccggaaatcttctcgacctgcaccgggccgcaccagccatcgatgctgtagttctccaatggcagatctcgagtcgcttcgtatgtcaagatcgagccgacctcttgcgccagttcgcggaagttcttggtgctgatgtccgcacggcgcatcaatccaagcttgtggcgaataagtggatggcggatctctctaatggtcatgggcggctccggcggtcgaataaaccggcgtagattaatgcatcgggctgataccggctattgaagcgtcaaacggggcttgccctgacaagggccgcatcggtatcgtcgcgccctttattttccgggtagccgaccgagctgcttgtatcctcaaactgtctggagcatcgccatgtccgtcgatctcgcacatatccgccagatcatggccgaagccgattgtctttatgctgaagccgaggtagaggcggcaatcgatgcgatggctacaaaaatcaatgcggacctggccgagcgtaatcccgtcgtgttctgcgtcatgaacggcgggctgatattttcaggcaagctggtacccaagctgaacttcccgctggagctctcctatctacacgctacgcgttatcgcaacgagaccagcggcggtgagctgttctggaaggccaagcccgagatttccttcatcgaccgcgacgttctgatcatcgacgacattctcgatgaggggcacacgctgggagcgatcattgatttctgccggcatgccggtgcgtccgccgtgcacacggccgtattggtcgacaaggatcaccagcgtaaagcccgtccagacctgaaagccgattacgcggggctcagctgcgttgatcgctacgtattcggctatggcatggactacaaaggctactggcggaacgcccccggtatctacgccgtcaagggcatgtagcaggtacgctacccctccgcagtcacgggcggatgccgcccgacccgcgtgccaatcgcgcgacgatccgtcgcgctgattcctttctggaaatcctgagtcttcatggcttatcgcccggccacctggtatcggggtaccgtcgcgctgccgatccctgggcccccggtcgcggatcgcaagcttccttagtgactgtttcgtttcgccccacatgcgcaggctcggtaacgcctcggctcggcgtgatcggccttcgtgtggcggccgatggcgcgcgcctggcggctggcctcggtgatccaggcctgactgtggcgtttctagctggttttccaccgatttcacgccaacagtgtcgcagctgctctatctcgggggttgcgcccgtctggttggcggctaagctctccggtagcttcgctcgggggctgcgtctcgaacagtcatgtacgtgatgcaacccagtggtgggaaggctattcatacttaaggattacaaaacaaatcaaaccttagtgcgcttaaccctctgctgccgtctggttagggtgagcgtacttcgaaccaaccaggagcgcctcatgacaaaaacaacaaggcaaggaatcttccagcccaagacattggctctcgccattgctctgggttctgtcgcaccggcttatgcggtcacgttcaatatcggggagattgaaggtcagctggattcgtccatgtcgatcggcgccagctggtcgacggccgatcgggatatggatctggtgggcattaataacggggggaggggattcacccagacgggtgatgatggccgactgaatttcaagaaaggcgagactttctccaagattttcaaaggtattcatgaccttgagctgcgctacggcgatagcggtgctttcattcgtggcaaatactggtatgacttcgaactgaaggatgagcatcgcctgttcaaggacatcagcgacagcaaccgcaaggaagctgcgcaatcctctggcgcgcagattctcgatgctttcctgtaccacaactattatttgggcgagctgcctggcacggtccggattggtaagcaggtcgttagctggggtgagagcaccttcatcggaaactcgatcaactcgatcaacccactcgacgctgccgctttccgtcgcccaggtgcagaaatcaaagaaggcctgatcccagttaacatgctctacgtatctcagagcattaacgaccgtctgagcatggaggccttctaccagctcgaatgggaccagaccattgtcgacaactgcggaaccttcttcggcagtgacgtggcggcagatggctgtgatgacaattatcatgttggcagtgcggcgatcgcgccgcttcagccgctggctgctgcgttcggacaagggtttgatgtgacctccgaaggcgttgtcgttccgcgtggcggcgatcgtgatgcccgagactctgggcagtacggctttgcatttcggtggttgggcgatactgcagaatacggcgcgtatttcatgaactaccacagccgtacaccaatcgtgagcactcaaactgcttccggggttgtggatatggccggcaatcccctgtttggatcggctgttggcggggcggtagctgttcctggcggcccatgtgatccggcagtatttggcgctgcaacacctcagtgcgtgcgtggagtagctggcggtatcgttcagtcggcggcgctgggtaatggccgctactaccttgaatatccagaagacatccgtttgtacggaatgagcttttcgaccacgcttcccactggtacagcttgggctggcgaaatcagctatcgtccgaacgccccggttcagattaatgctactgatcttacgcgagccctcctcaatccgatcgcaggaggcacagcctcgcctgtcgcatctatcgagggtgccgacaaccgcggatacaatcgaaaagaaatcacgcaagttcaaactacctttacccatttctttgatcaggtactgggtgcgggccgcgtgacggttgtaggcgaagtaggttatgcccatgttggcgggctggagagtacaagcgagctccgttacggtcgtgattcggcctacggtacgcctgatgatccagtgcaactggcagcgtacggcaacgatggcttcgtaacgtccaactcctggggctaccgcctccgcgcgctggctgactacagcaacgtgttcgccggtgtgaacctgacgccgaacgtctccttctcccatgatgttcatggttatggcccgaacggcttgttcaacgagggttccaaggctgtaagcgttggtgtcgacgccgtctatcagaacagctacaccgccagcctgtcctacaccgacttcttcggtggcgactacaacaccctggtcgatcgtgacttcctcgcgttgagcgtaggcgtgaacttctaagaggccgcagtaaccgcgcggtatgggccggtgtgcccgccgcgcgacaagcttcatgcgagcctgcgaccaaaacaagatcaagaggaactggaagcgtatgaaaacaacaagaaaactattcagcgtcttggccctttcactgcttgcgagcagcgttatggccgccgtgtcccctgaggaagcggccaagcttggcaactcgctcaccccgcttggtgccgaaaaggccggcaacgccgacggcaccattcccgagtggactggtggactggccaccgatgctgcaccgcttaacgacggccatgtcaccaaccccttcaaggctgagcagcccaagttcgtcatcaccgcgcagaacgccgaccagtacaaggacaagctgaccgccgggcagcaggcgatgttcaagcgctatcccgagacctacaagatccgcgtattcccgacacatcgcagtgcggccgtaccggatcggatctacgaggcagcgaagaaaagcgccttgaatgtggagttggtcggtgggggtaacggcgtcgataacttcgccgacagccgctactacgcattcccgatcccgaaaaacggtctggaagtgatctggaaccacatcacccgttatcgtggaggcaacgtacgccgcaacatcgtgcaggccaccccgcagaccaacggcagctacaccctggtgcacttcgaagacgaagtggcgttcccgagcgacatgacggatctggatccggaacgcgccaagaacgcgctgctgttcttcaagcagcgcgtaacggctccctcgcgacttgcaggcaacgtgctgctggtgcatgactcgctggaccaagtgaaagagccacgtcaggcctggatttacaacgccggtcagcgtcgcgtgcgtcgtgcgcctcaagtcgcctatgacggtccgggcaccgccgcggacggtatgcggacgaccgataacttcgacatgttcagcggagcccctgatcgttacgactggaagttggtcggcaagaaagaggtgtacatcccgtacaacagcttcgatatcaactccagtgacgtgaagtacagcgatatcctcaaggccggtcatgtcaatcaggacctggctcgctacgagctgcaccgggtatgggaaatcgaggcgaacctcaaggatggcgagcggaacatctacgccaagcgtcgtttcttcgtagacgaggatagctggcagatcgccgagtccgagctctatgacggtcgcggtcagctgtggcgtgtgggcgaggcgcacctgctgcagtactaccagcacaaggtgccggcttatgcgttcgaagcgctctacgacgtgatttccggtcgctacatcgcgattggcatgagcaacgaagagaaagcccacgagttcggctacaagacctcggcccgggatttcactcccgctgcgctgcgaaatgcaggggtgcgttgatcaactgacatccacttgatgaataaggcggccaattggccgccttttttttttgcatgcggcgggggatgatactttttggccattagcagggccgggcatcggctcgggcgggctgaaggcgttgcgccagtcgacaaatgcggcggcatcgtgcaggttgtggtcgcatacaggtaccggtacggttcgagtttgtgcacggagcggatccagaccgctgcgctcaacgcgttctcaatggattgatacgaataagagaaacctcgctatgtccgtacgcttcaaccctggtgtcctcagtacagaagccgccgcgcaggttcaggtcgccacgattccgcgtctccccccgttgcacgttccgcggccacggctcgtcgatgcactgctcgaagcccgttgtcggctgcgtttgatatgcgcgccggcggggttcggcaagagcgtactgatgaacgagtgcgcacgtctggtaccggccgatacccatcttgtctggctcgatctcggcggtcggtcgtattctgccgaagcgctttatttacagctcagccgattgctcgatacgtctcccgtcgccagtggcgacgttcagcaagatctggtcaacctgctgcatgagttccagcggccgctgtggatcatgctcgacgactacccgagagaaaccaccgcgcaattcgatgcgtgcctcgatctgcttctcgagcgaggccccgaatctgtcagctggtgggtgagcagtcgccggcagcccgcctggaaattgcctcggctgttgctgcagggcgatctgtacgagctggaagccgagacgctggcactgacggctggtgagctcagccagttgctcaaggctcaccgcctcgagctcgccgacgacacgttcaagcaattgctggtcggcagcgaagggtggttggccggtgtcagtctgttgttactgaacgcgaacgagcaggcggtacgcgagcggttggtggcggggacgcccttgttgcgggattacgttcagcgcgaagtgctcgaagggcagagcgaagacgtgcgtcgcgcattgttcgcactggcgcgaatgccgcgtttttccgcgcagctgtgtgagcacgtgctcgatgggatcggaaacgacattctcgacgtgctcaagacgttccagttgttcatccgccagatcgacaactgcggtgaatggtttcgcctatggcggcctctggcatcgatgctgcggcggatgcccgaggcgatatcacccacgcagacccatctgcgcgcctgtcaatggttcgccaatcgcggggagatgcgcgaggcggtagagcatgcgctatgggcgggacagcccgaagtggcggccaatttcctgcagcgctacggacaggagcagctgctcatcggcgataacgtctcgcatttcatgaaatggcgcagcgagttaccgcaggatctgttcaacagcaccacgcgcttgatcgtattgcacggctgggcgttgatcatttccgcgcggctcgatgaggcggatgaatgcctcgcgggtctggccaagttctttccccagcccgatgctcgacgtcaggcgcaattgcttgctcaatggcaggccctgcgcggcttcctggcacgcttgcgcggcgagcccgaggcccgaaactactgccttcaggcgttggaggtgctatccgatcacgcctgggcgcagcgggtgctgtgctatcaggcgctgacccagcaggcgatggctgagaaccagctggagctggctcaacgctacaacagcgagggcatgaagctggcgcggctcaagggcagcgtgttgtatgaggccatgctgaatgtcgatcgtatccagttgctggagatcacaggagagttcgagcgcgccgtcggggtgctcgaagagtcgctgttggtgctacgcgacactgtcgcccatagcccgatcatcggccggctgaagctgctgcaggggcacttgctggcgtatcagggcctcgacgaggcggctcgggacgcttaccagcaggggcgagtcgagaccgaaacctgcggtgactcttacatgttcttcggctatgccggcctggccgaactggctgcccgcaatcaggaattcccgacggcgtaccattggttgcgtgaggccgagcgcctgactcagtggcggcacgtgccagaggcgcgtttccgcggcattttgccgttgataacagggctgacctggttgcatcaggggcaactgaaaaaggccaggaccgttttcatccaggtattggagctgtacgaggggcacacctacctggctccttccgggttttacgaattgctgccacgggtgcagcgttacctcgcggtggtcgatctgctctccggccgctttgcgctggccatcgatacgctgcgggagctgatcgagcagaatctccgttcgcaacggatggggttggcttgcgagtgtcggttcacgcttgcagaggcgctgcagctggatggccggcatgacgaagcggaactggagctgcgcaaggcgcttggcgaggccgcccggcaacatctgatcaagccgttgtatgagctgcagcatcgccaaccgcaatggctcgccagcgtgttgcctgcgggcaaaggggaaaatctccgcgatcggctgcatcacttcgagcgcgagcctgaagattcgctgaatgccgctggcgaggtgattctcagcaatcgcgagctcactgtgctgcgtcttatcgcccaaggttgctcgaatcaggaaatcgccgaacagctcttcatctcgttgcacacggtcaagacccatgcccgccgaatcaacaccaagctgggcgttgccaggcggacacaggcggttgctcgcgccaaggcgctggcctggttatgagcaactgacgagtcgctgaaaatgatgcgccgggctgctgcgagacggcgcgatgtgcaggacgcctcgcagctatggggcagaacagttgccggctcgtagcaagtagaagccagtcgtagcaaaacgagtggctttagcggacggcggaatgcgcgtgtttggtcaggcgataggtgctggcgtgttcgccgcgttcgatcgcgaggctgaactgcaggctggtgatcagacgctcgagctgctgctgatcgcgccattgattagtgctgataaagcgcttcaccgcgacgcccgttgcatcggtcaaggtcagcagaatgctgccgtccggcttctcgatgctgaaattgacgttgtactccggctggaatacatcgctgatcttcttgaatggactgtccatcgccgcgtacctgattggttgacccaaccaatggaccgggcggcgattaactagtttcgcccgtttggcgtggggcctgcggcaaaacgaagcagtgcgccggtgaaggctatcgcgagtcctcggcttcgctcgagtccggcagctctgccagggcctcggggttgttcttgaacgccttggcgaacgactcccggtgcctggccatgaaaatgccgatgtcatcggcttgctgttcgctcagcgatggtgccgccttatgcagtgctgcggccagcgcttcggccaattccagcatcttgtcgtgacgatcggcttcggctttatccatgaacaaacgctccaggtcccggctgctgcggtataccacttcgacggccatttaccacctcggctcaatgaatgaatactggttgtttatacagcttatggtgttcgggactgaatgaaaagcgctgtgtgtcagttggccagctcagtcgttgaaatgtccctgaagccgctctgcgcgaaactccaggctactgctgcgatagccctgacgcagcggcggcaacggcgcacaggactcccagcgctgaccgggctgcaggtcgccagggccgcggtatcttggggcatcgtagttcgacgtcaccagattcaggctgcccccgggcgaatacgcggcgacatcccagcgcagactttgtagagcgcgcgaactgtggttatcgagggtaatacgcagcggctgcgcagctgggcagatagccggtgcatagaccagtctcagctcgagttgagcgagcaggtgttcttcgcgctgttcctgccagaccacccaggccgcgaccagtccgaggccaagcagtgcacccagagaaatcggaatggctcgaacaggatagcgaatcaggaagatcacccaggtgaccagcaacagggcaccgatcagcatggtgagtacgtacttgaacaggtaggcatcgatacatcgctctttgttgggggcgataacctcctggtttcggccccggcaggtcgcatccgccgccgtctcgctaagcggctgcgaagcggcgggggcaggtcactcctcttctgcaggccgagcatgccgggcgagtcgttcaagggcggccttgagtctgggatcggcgatgccctgtgctgtttcatgaagattatcggctgcgcgtgtcgacagcgccggtgccggcccgggcttgtgtcgcggcgcctcggggggctgtaccttgaattggatccggcccagatcccggaactcttccatggcctgcaactgccgctgcagcctgcgttgctgatagcgcaaacgcgtcgcccagtgcccatccgtgacaatcagcagcaggatgccgtcgcgccatgaagccacgcggcagtactcccgtgcggccggttgcagctgagtctcgaccagttgttgcagccgatcgagccgccgcgcttcgccgaacagggccttcaacggttttgcctcgcgcagcagcgaagcgggggctttggctggcagggggcgcaacgacatggtgaaaccctggggtgagagatgaacaggcatattagcagaagcacccgtgagcttatgacggggcggtcgttcggtatgccgggtgacgcatcgcgcaagcaggcgggccgcggctgcggttgtaatggcgaattggcagcgttgcggctgaagatgactgtcgggtcggagcaaccgtcgcacctccggccgccgtagctgcgcagtaggcacctttcctccccgacgtttccgagtagaatgccccctttgcacgcagccgtggtggccctgcggccgtgcctccatccccagcatggaagtctttgtcgatatgtttgcgcctttaatgaagaagctctttggtagcaagaatgaccgcgaggtcaagcgcatgctcaaggcggtacaagccgtcaatgcgctcgaagagcagatgctgtctctctccgatgagcagttgcggagcaagaccgaagagttcaaggcccgcctcggccaaggcgagaccctcgaccagatccttccggaagcgttcgcggtctgtcgtgaagcgggtaagcgtgtaatgggcatgcgccacttcgacgttcagctgatcggcggcatgacgctgcacgaaggcaagatcgccgagatgcgcaccggtgagggcaagaccctggtggcgacactcgcggtctatctcaacgcgttggctggcaagggcgttcacgtggtgacagtgaacgattacctcgcgcggcgcgatgccaactggatgcgcccgctgtacgaattcctcggcctgacggtgggtatcgtcacgccgttccagccaccgcaagagaagcgcgcggcctacgcggcggatatcacttacggtaccaacaacgagttcggcttcgattacctgcgcgacaacatggcgttcagtctcgaagagaagaaccagcgcgaactcaatttcgcggtcatcgacgaagtggactcgatcctcatcgacgaagcccgtacgccgctgatcatttccggtcaggccgaagacagctccaagctgtaccaacagatcaaccagctgattcctctgctcaagcagcatatcgaggaggaggagggcgtggtcacccaggaaggccatttcaccgtcgacgagaagactcgccaggtcgaactgaacgaggccgggcatcagttcgtcgaggaaatgctgaccaaggccggtctgctggccgaaggcgagagcctctattccgcgcataacctcgggttgctgacccacgtctattccagcctgcgcgcgcacaagctgttccaccgcaacgtcgaatacatcgtgcagaacaaccaggttctgctgatcgacgagcataccggccggaccatgccgggccgtcgcctgtcggaaggtctgcaccaggccatcgaagcgaaggagggcctgccgatccagccggaaagccagaccctggcttcgaccacgttccagaattacttccgcctgtacagcaagctttccggcatgaccggcaccgccgataccgaagccttcgagttcatgcagatctacaacctgccggtgatggtcatcccgaccaacaagccgctggcacgtaaggattacaacgacctcgtctacctgacccaggaagagaagttcgccgcgatcatcgccgacatcaaggactgccagaacaacggtcgcccggtgttggtcggtaccgcgacgatcgagagctctgaatacgtgtcgcaactgctgcagaaggaaggcatcgaacacaaggtgctcaacgccaagcaccacgacaaggaagccgagatcatcgcccaggccggacgccccggggcggtgaccatcgcgaccaacatggccggtcgcggtaccgatattcttctcggcggtaactgggaagtggaggtcgcgtcgctggagaacccgaccgacgagcaagtggcgcagatcaaggccgaatggcagaagcggcaccaggccgtgctcgaggccggtggtctgcatgtgatcgcgtccgaacgccacgaatcacgtcgtatcgacaaccagctgcgtggccgtgccggacgtcagggtgacgccggctcgagccgcttctacctgtcgctcgaagacagcctgatgcgcatcttcgcctccgatcgggtgaagaatttcatgaaggcgctgggcatggagtccggcgaggccatcgagcaccgcatggtcaccaacgccatcgagaaggctcagcgaaaggtcgagggtcgcaacttcgacatgcgtaagcagttgctcgaatacgacgacgtcgccaacgagcagcgcaaggtgatctaccacatgcgcaacagcctgctggccgccagcgagattggcgagaccatcgccgagttccgccgcgaggccctcgatcacgccatcagccagcacattccgccccaatcgctgccggagcagtgggatatcgccggcctggaagcggtgctttacagcgatttcggtacgcgtctgccggtccagcagtggctcgacgaagacgagaaactgtatgaggaaaccctgcgcgagcgcatcctcgaggcgttggtcgccgcgtatcacgagaaagaggacctggcaggtgccgaggcgctgaggaccttcgagaagcagatcgtgctgcgtgtgctcgacgatctgtggaaggatcatctgtcgaccatggaccacctgcgtcacggtatccacctgcgtggctacgcgcagaagaacccgaagcaggagtacaagcgcgaatcgttcgccctgttccaggacctgctcgaatccatcaagcgcgacagcatccgcgtgctatcccatgtgcaggtacgccgcgaggatcctgccgaagaggagcagcgcctgcgccgtgaagccgaggaactggcgcagcgcatgcagttccagcatgctgaggtgtcggcgctggagcaggacgaggtcgagccggaggccgagggcggcatagccactgcggctgcgcccgcgcgcgctgagcagaagatcgggcgtaacgaaccctgtccttgtggctccggcaagaaatacaaacactgtcacgggcaggttcaataaccagagcctcccgatacgacccacgccgcgaccggcttagccgctcgcggcgtttttctccccgtttcccggtggccgaaggccatccaatcgtcccctaaggagtgcatcaatggctgtcggtcttggtcccttacctactctgcatcctgttcccggtttcgaactcggcatcgcgtcggccggcatcaagcgaccggggcgcaaggatgtcgtggtgatgcgctgtgccgaaggatcgaccgttgccggcgtgtttaccctgaatgcgttttgcgccgcaccggtgattctggccaagcagcgggctcagggcgcggtgcgctatctgctgaccaacacaggcaacgccaacgctggcaccggtgaaccggggatgcaggcggcaacgcgcagctgcgccagcctcgcgaaactggtcggctgtgacgaacacgccgttttgccgttctccaccggcgtgatcggtgagctgctgccggtcgacaagatcgaggccgcgctgccggccgccatcgcggacctggacgagaatcactgggctgaagcggcaaccggcatcatgaccaccgacaccctgcccaagggcgcgagccgccagttccagcacgacggcgtcacggttaccgttaccggtatctccaagggggccgggatgattcgcccgaatatggccacgatgcttggctatatcgccacggatgccaaggtggcccagcccgtcctgcaggatctgttgcgcgatgcggcgaacaagtcgttcaaccgcatcaccatcgatggcgacacctcgacgaacgattgctgcatgttggtcgctaccggcaaggctgcgctcgcggaaatcaccgaagccagtggtgagctgttcgaaaagctcaagaaggcggtgttcgaagtcagcatggaggtggctcagtccatcgttcgcgacggcgaaggggcgaccaagttcgtcacggtcatggtcaacggtggcaagaatcatcaggaatgcctcgatgtcgcctatgccgttgcgcactcaccgctgatcaagaccgcgttgttcgcgtccgatccgaactggggacgcatcctggcggcggtagggcgcgcgggtgtacccgagctcgatgtcggcctgatcgatgtctatctgggcgaggtgtgcatcgccagccagggtggtcgctcgcccagctacacagaagagcaaggtgccgcggtgatggccagggaagaaatcggcatccgcatcgaactggggcgcggggattgcagtgagacgatctggaccactgacctgtcccacgagtacgtgcggatcaatgccgaatatcgaacctgacagtcgggtggagccggcacctgaatcacgaggtgtcgccgaccggaaccaccaggaaactcgctttcagcttaggacctatcgttgaatcgcatccacgtcgctgctgccgttatccgctccactgacggtctggtgctgatcgccaagcgtccgctcgacaagcaccagggcgggttatgggaatttccgggcggcaaggttgaaaagggcgaggccgtcgaggtcgcgctcgcgcgggaattgctggaagagctgggtatcggcgtgacggccgcgcggccgctgatccaggtgcgccacgactaccctgacaagcatgtcctgcttgacgtctgggaagtgacggcgttctccggcgagcctcacggtgccgaaggccagccgctggcatgggtcgcatccgaacggttgccggactacacctttccagcggcgaaccgtccgatcgtcgccgccgcgcgcctgccggatcgctatctggtcacacccgacgacgcttccccgcggcaactgctggacggcttggcgcatgcgctggacgccggcatccgtctcgtacagctacgcgcaccgtcgctgtcgcaggccgattaccggttgctggcggccgacgccctggcggcgtgcgcggggcgtgcgcagctcatgctcaaggggccactggattgggcggccgattttccggccgctggctggcagctgacgtccgaacagttgcggcgacatgccgggcagtgccgaccggtagcggtcgggcaatggttggcagcgtcctgccacgatgccgaagagctggccatggcaacggcgttgggagtagatttcgtcacgttgtcgccggtcctgccgaccccgacgcaccccgaggccgctccgctggggtggctgcgggtagcggaactgctgcaaggcttcaaccacccggcgttcgtgctcggtggcatgacgccagcgcatctatcaacagcgcgccaagcgggtgcgcagggcgtggcggcgataagggcgctatggcccgctgaacctgcttgacgattgccggtcgatggcacagggttgcgcgttacttgagtttcgatagggaaaagtaataatgcctattcccttaatcaattaaccgtatgcggccagctgcgttatcgtaggcctcgtaaatttctgaaccccctgaaggagttagcagatgtctctgatcaacacccaagtccagccgttcaaggtcaacgcatttcacaacggcaagttcatcgaagtcaccgaagaatccctgaagggcaagtggtcggtactgattttcatgccggcggccttcaccttcaactgcccgaccgagatcgaagacgcggccaacaactacgccgagttccagaaggcgggtgccgaggtgtatatcgttaccaccgacactcatttctcacacaaggtctggcacgaaacctcgccagccgttggcaaggctcagttcccgctgatcggtgatccgacccaccagctgaccaacgcctttggcgtgcacatcgccgaagaaggcctggcactgcgtggcaccttcatcatcaacccggaaggccagatcaagaccctggaaatccactccaacgaaatcgcgcgtgacgtcggcgaaaccctgcgcaagctgaaagctgcccagtacaccgccgcgcatccgggcgaagtttgcccggccaagtggaaagaaggcgagaagaccctggctccttcgctggacctggtcggcaagatctaaacggtcggcaagcgctgcgcttagccgcagcgcctcggtaccgttctcggcagcgtatcgctccgagacaccaaacgcctggacgcgaaacgtccgggcgttttattaaacgaattctgcaagtcgggagtcgctgttcatgttggacaccaatctcaaagcgcaactgaaaacctacctggaaaaggtcacccagccgttcgagatcgtcgcgtccctcggtgacggcgagaaatcccaggaaatgctcgagctgctggaagagatcaccagcctgagcgacaagatcacgctgcgcaccgatggcgacgacgttcgtcgtccgtcgttcgcgctcaaccgcatcggcggcaatatcagcctgcgcttcgccggcatcccgatgggccacgaattcacttcgctggtcctggccctgctgcaggtcggtggccatccgtcgaagaccgcgccggagatcatcgagcagatcaggaacctcgacggc

SEQ ID NO: 27 - DNA, 56133 bp, Pseudomonas sp.
gtcggcgagggcgccaaggcttcgctgagcgccttcgatcacctgatacgcagttcggtcgccgactgagccgcgggtaaacgaaaagggggagtcgacgcaggtcggctccccctttttcgttctggtggctcgatgccgagcagcgacgagccgggctgcggaaggatagatagcgtaaatcgggggtctatccgatacaccggatccgctttggtcgggtggaaacgagcgaaggaagcggcagcgaccgtttcgtcgtgcatgtaccagtagtccatggagcgaatccacctatgaagagtgcggatacgccgcaagaggctcgaggggccgttgtaaccctcggcaaccgatccaatgagccgcaacacgaaagggcggtgcacgagcaactcgccaagcgtctggctgcgctgcaagggctggctttcctcggtgagtatgaccgcagcagcagctacccgcggcagctgtacttcgtcccttcaggaactctggtcgggacggacgtggcgcgtcggctcggcgtggaaagcgagcgggatctgtttggcggtgtagtgccccacgcgttcatcgaaaccaaggcgatcacccacccactggtgcgtccggatgcggactcgcccatcggttggtcgcgcgactttggccggcgcgtcaccggcggcgtcttgcccggctacagcgttttctcattggcggatgcacgcgaggccgggcggcgtctgctgaacgaaggcgcgttgcgggtcaagccggtgcgtgccacaggcggtcgtgggcaggaacgggtagggacgatccaggagctcgaccatgcgctgggaaaggtggatgaagccgagctggcggaatacgggcttgtactcgaagcgaacctggagcacgtcacgacattcagtgtggggcagatccgggttgcaggaagaacgttgagctatcacggcacccagcggttgacccaggacaatagcggcgaaaccgtttatggcggctcggatctgctgctcgtcgaaggcgacttcgacgcgctgctggacctggacctgcccgaaaggacgcgcctggccatttcccaggcgcaaatctacgacgacgcggcgtcggcatgctttcgccatttcttcgcgtctcggcgcaattacgacattgcgcaaggcatcgatgacaaagggcgcgcctgctccggagtgctggagcaatcctggcgaatcggcggcgccagcagtgccgaggtggcggcgctggaggcgttcgtgcgcggtacgaccggatcggtcattcgcgcgtcttcagtcgagctctatggcgaagcgcaggtgcccgaaggcgctacggtgctgtttcgcggcgaagacgccgacgtcggattcataaccaaatacgcattggtggaggaccatggcaacccacagtgaaagcgtcgatatcttggtggatgacgagcatattgccggcaccttcctgtcaccgccgaccaagctgcctggcgtactcttcgtacatggctggggcggcagtcaggagcgtgacctggcacgtgcccgcgggatcgccgggctaggctgcatctgcctgtcgttcgacttgcgcggtcatgccctgacgctggcgcaacagcagacggtcacgcgggagcaaaacctgagagacctgctggccgcctatgacctgctggtgcaacacccgaacatcgatccctcggcgatcgcggtggtcggcaccagctacggtggctatctggcgactctgctcacgacgttgcgaccggtcaaatggctggcgctacgggtgcccgcgctgtacggcgacgaggactgggcggtgcccaagcggcagctggatcgtgacacgctcaatcagctgcgagggcgtcgggtgatgcctgaagagaaccgcgcgctggccgcctgtgcggcgtttcgcggggatgtgttgatcgtcgagtcggagcacgatcatctggtcccgcacagcacgatcatgagttatcgagccgcctttcatcagacgcattcgctgacccatcgcatcatcctcggcgccgatcatgccctgacccacgagccctgccagaaggcctatacggatatcctggtcaactgggcgaccgagatggtggtcggtgcacgtatcgatcagcagcacggtgcggccgcggcggggtccccatagcctcgtgattgtcgccacggcatcagccgggcggttctggtggctcgatcggcccgacaaagcggctccagcggcggtcgagcacctgttgcttgagcacttcgatgatatcgaccagcacttcctccagggccaggtcggtgtcttcgtcctggtacacccaggcttcgaagcattcgtccgccaggctgcgcgccagccgctggaactgagccccctgcagcccatcgatcgcgccctgtagcaggcgtgacgcaatgtccgtgagtgcctcgtccagggtgtcggcgacccgatcacccagcggcaggcggcgcaggcgattgacttcggggttgttggccagcgcctggtgaatcaaaccgccgacatagccctcgatggcgccacggttgtcccggtagccgctttccagcatgccctgcaggcggcgagacaggtcgttgagcagccgctccttgcgtggcctcaccacttcttcgagcagccttcgcgacaggtcatcgctggccccaatctcctgctgcatgcggctgaacagccgaaccatgacgcgatcggacaactcttcgagcaggagcgagtagtagcgatgaagcacgccgaagaccgcccattggcgaacgtcgatcagccccagccgttgcagccgaaccagcaagctgccgatccgcaatacgcgcagccagcgaaaaccgctcaacgggatacagccgagtacgtcgtaccagtgagcgaaggggtaatagaaccagcgcgcgtagcgccgctcgaacaacgcaacggtccagccgagcaggacgtcgaagacgaataccgcgacgaaacccaggtcaatcagctggaaattgcgatgaatcagtgtctcgtagcgctgatgcagccccggcagccagccggcgatggcctggttgatgggctgcacgatgaacaggctgtcgaacaggatcagtgccaggttgacgcacaccagcaggacgatgaacgtatcccaggcggcgtgcagcccgttacggatgctttcgcgccggtcggcgcgatgttcaggcattggcatcgggcgcattggccgcgtgccagaggatttcggcgcagccctgtcggcgcgcgatcagacgcgcaacgacgaagaacaggtccgatagccgattgaggtaggccagcccgaccgggcgcagtggttcgatggcattgagttgctgacagcgcctctcggcagtgcgggccatgctgcggcacagatgggcgagggcgataagccgtgtgccgccgggcatgatgaagtcttcgagcgggccgagctcctggttccagtgatcgatcgccgcctccaggcgagccacttcgctatcggccaaggcctgataatccggcatcgccagctctccgcccagatcgaagagacggtgctggcaggggctcagtacctcgatgagttcggccagttgcggccagcgcgcctgcgcttcggcgagttcggccagcagcagccccaactggctgttgagcgtgtcgatctcccccatggcctcgatgcgcgggtgatctttcgggacccggcggccgtcggccagtccggtctgcccagcgtcgccggtacgggtgtagatcttcgatagtcgattgcccatcggtgattccctgattctgcttcagttggcgtcggtggccgatgtcagcggcaggcgcagggtgaaggtcgttccctggtccggccggctgtgcacctccatctggcccttgtggttgttggtgatgatgaaatacgaaacggaaagccccaggccggttccctgacccacctccttggtggtgaagaaaggctcgaagatgcgcttgcggacatgttccggaattccgctgccattgtcttccacctggatctcggcccatggcgggttcagtcgggtgcgcaagatgatctggccgcgaccccgttccggtttatggtggatggcttgcgcggcgttcttcagcaggttgagcaggacctgctcgagttcgttgccgatgcagggcacgcggtccacttgaggatcgaagtcgcggacgatctcgatggaacggaagtcgaaaccctccatcaaggcgaagtcgctccccgcgatttcgagcgcctgatcgatcagtacggtcagctggcagtcggccagttgccggttgctcaggcggctgaaactcaacatgtggctgacgatcttcgcggcgcgcgagccagcctgctggatgccgtcgagcagttgcgggatctcccgtcgctggagatagcgattcaccgcctccagcagtacgccggtttcatcggcggcctcgcggtttcgttccaggtccggcgacaggcgacggcggatattctgcgcgttatgcagaatggcacccagcggattgttgatttcgtgagccatgccggcggcgaggctgccgaccgacaacatcttttccgactgcaccatgatctcctccatgttgatgcgttcggtaatgtcgtcgatgcgaatcaccacgccgcggccgccgccacccatcagcggatagagcgtcagcgcatagtgccggggctcgtcgttgacgatccaggtgacccgttcgatcttttcgacctgatggcgctcggacgcgcgacgaatctgcgtcaggaacggcttgagcggctcgaaggcgatgaacaccggctggttcagcgcatcgtcgatggaggtgccggagagggcgctggcctgctgattccactgggtcacgtacagctgctcgtccagggcgataagcaccgacggcatcgaatcgataatgctgttcaggtagttttggaaaccggtgagctttttttcgatcttgctgcgaacctggacctccagctcgagcttacggttggagtgacgggtttcctcggccaggccctgggcatggtcgaacgcgtcctgggcgtcgtcgcgcgcgcgtttgagctgctgctcgcgcgcctccatgcgtgacagcatggtgttgaaggcatcggccagccgcccgatttcgtcctggctcctcgacgtcacgcgcaacgaatagtcttcttcacgcgtgacctgacgcgacagcgcttcgaggtcgcggattgggtgcgtgatcagccggcgtatctgcctggcgaccagcacccataacaacaggctcaccaggaggatggcgaggctggcggtcaaggtgccggtatagaaggcgccgggcagctcgctactggcaatgatcagcagatggccgggcgggccggcggtttgcggcagctcgaccagcagattggcgcgcatttcggtcttttgccaaagcggcaggtcgctgacccgctgcggcagatccagtggagcgccgcggtacagttgcgccagccgccgcccgtcgctgtcgtagatgactgcggcacgtagcggggcgtagtcgttcagcttctgcagcagctcgttcgccgcggtttcggatgccagcgcgcggttgctcagttcaggcgtcgccagcagcgcgccgagtgtatgcatggcctggggcgcgacgctctgacgcgagatccaataggccgcactgatgaacgcgaggttggacaccagcagcaccgctgcaagcagtaccaatagtgcgatcagcaacttgcggccgaccggaaggttttcgaggcgctggcgcagggtcatggcagctacaggcgaagggttgtttcagcagggtagcggcgcctcagtcctcgggcaatccgcgctggcgcaggagcgtctgcagctgttccaacaacgcccacagtctcggtacttcaaggccatgcgatcgtgcggtgcggcacgcttgtccgagcagaaagccgacttcggtccggcgtccaccgctgacgtcctgatgcatcgacgagtagttgtcggcggttgcctcgatcactcgaagcacttcgttttccagcccctcggcggcggcaccctgatcgcaggattggagcagtgcgcccagttcgtcgcagatctggtgcaattcggcgcggtgagccagcagcgcgccgttgcggcagtcatgcagcacgctcagcggattgatggcgcaattgatcgccaatttacgccacagcttgcccatgatggcgtcgctccaggcatagggaatgccggcagcgtcgaggtcggcgagccatggcggcgggctgccgtggcccggcgtgcccaaccagttcaggccttgcccggcatggacgacccgaaagccgggttggcgataggcaccttcggtgctggagacgaagatgcagcggctctccggccagcgggccgcgacggcctgttggctgcccaggccattctgcagcaggaggatttccgcgccttcgatcagccgcggcgccacatcggcgatggccgcttcgacgtcgtaggctttgcaggcgaccagcagccgcgcgattggcgtggccgcatcgggaagctcggcaggcgctggaagaaggctggttgccccgttctcgaccagcgtcaggccaccggcgtccttataatcgtcgagtcgctgctgattgcgcagaatgatcctcaccggtatgcctgcacgataaagccgcgcggcccacagcccgccaaggctacccgcgcccagaatgtgccaggtgcggcccatcaggcgggttctttgtaacgcaggggcacgatgcgtccggtggtataggcgtcggccagcaaggattcggcacgttcgacgattcgtcgcggctcgaccggcaacgtcgcggtatcgacactgatcaggccgatacccgccttgaccgtgatgaatccttcgctggtcttgaacgccttgagattgagcccgtcgtgcagccgtttgaagctgctcggcgagcagccgcgcagatcctcgaccagggtcagcaggccgaagcgtccatcatccagacgggtcagtacatcgagcgggcgtaccagctgctgcaggcgccttgccacagcgcgcagcaactcttcatgaaactgccggccgtagcgctcccgttgaaccgccagctccggcaggccgatcagcagatagcacagcgcgccgccgcggctctcgatctgacgcaggctgtcgccgagccgctgatgcaggtagcgcgcgttgccgaggccggtgaccgggtcgatcaggttgcgttcttccaggctggtgatgttctcggtcagcagacggttctcccgtatgagccgctgcaaagagccgcagagccggtcggcggcatacacgcgcggcaccagctgatcgttcatcgccgacttgccgataaagtcgtccacgccttgatcgaaggccttgttgagcacgtcctgaccgtcgcgtccggtcagcagaatgatgtaggtgtagtgatcggacatttcatcctgctggcgaacctgtccggtcagctccaggccgtccatctccggcatcagccagtcggcgagcaggacgttcgccggacgctgttcgagcatctccaatgcggcgctggcgctgttggcgaagcggatgtcttcgtacccggccttggacagggcgcggccgatcatgacgctggaaaacttggcgtcgtcgaccaccaggatgctgagttgagggttgggcattgacgggctcagaggaaggaaattgccgtaacgccggctgaccgggcgcttttggcctgaacagttataatgatggcccatttgaaccgtcaagctaagcgcgctgagtcacaccatggcgccgtttttataggagcaagccgatgccctcgttcgacgtggtgtccgaactggacaagcacgaagtcaccaacgccgtcgacaatgccgtcaaggagctggaccgacgttacgacctgcgtggtaaaggtactttcgagctcaaggagctcacggtccatctgaccgccgacgccgatttccaattggagcagatgctggaaatcctcaagttgagcctggtcaagcgcaagatcgatattcagtgcctggagttcaaggatccttacccgtccggcaaatcggtcaagcaggacgtggtgctgcgtgaaggcatcgacaaggagctggccaagaaaatagtcgcgcacatcaaggacgccaagctcaaggtgcaagccgccatccagggtgaacaggtcagggtcaccggcaagaagcgcgacgatctgcaggaagccatcgcgctgctgcgggccaaggatttcggcatgccgttgcagttcaacaacttccgcgactgatacaccggcacgcatgcgtgccgtcccgtttttaccgagcggcccctgttggccgctcgatgttttcaaggagacatttaccaatggatttcagcgtcgattacctggtcggtctatccgaagcgtggctgccggtcgttctgcaatacggtgcccaattactgctggcgttggccacgttcctgatcggctggtggctgatcaacaccctggtcagcaaggtgggcggtctgctgcagcgtcgccaggtggacccctctctgcacggcttcatcgagagcttgtcgagcattgtcctgaaggtgctgttgctggtcagcgtggcctcgatgatcggtgtggagacgacatcgttcatcgccgtgatcggtgccgcgggcttggccatcggcctggcgctgcagggcagcctgggcaattttgcaggtggggtgctgattctgctgttccgtccgatccgcgtcggtgaatggatcgaggcccagggcgtagccggtacggtgcactcgatccagatctttcataccgtgctcaagtcggcggataacaagacgatcgtggtgcccaacggcagtctgtccaatggccacatcaccaactactcccgcgagccgcgccgccgtgccgacatcaacatcggcatcgattacagcgcggacatcaagctggcacgccagatcctgctggatatcgcacaggacgagcgcgttctgcgcgatcccgagccggtggtcttcgtgaccgggctgggcgacagctcggtcaatctgtcgttgcgggtctgggtggcaactggcgacttctggccggtcaccttcagcttcaccgagcgggtgaaggagcgcttcgacgaggcgggcatcggtattccgtttccgcaacgcgtggtgcatctggtccagagctgaatgctctgatcacgaaaaagccggcgatcgccggcttttttcgttcagctgcgttcggtcgtcgccagcgggtcgggggtgtccggttgccggcggctgcgtgaccactgccagaggatcagcaccagggtcggcacgccgagcagcgcggtaaccaggaagaagtcgctgtagccgaggtgctcgaccatgacgccggaatagcctcccagcaggcgcggcaacagcaacatcagcgagctcagcaaggcgtactgggtagccgagaatttcaggttggtgaggctcgacaggtaggcgacgaaggcggtcgaggccagccccccgctgaagttgtcgcaggagatggtgatgatcagcatgttcaggttggcgcccatctcgaccaacagcatgaacatcagattggtcgcagcggaggcggcgccgccaacgaagaggatcggcaggatgttgaagcgcacgatcagcagaccgccgaacgccgcgccgagcagggtcatgatcagcccgaacagcttgctgacgctggcgatctggtccttgctgaaaccctggtcgatatagaacacgttggccatgacacccatcacggtgtcggacattcggtacgtggcgatcagccccagcaggagcaacgcctgccagcgatagcgcatgatgaagtcggtgatgggcgtcagtaccgggcccatcagaatccgtccgggagcggacaggcacccccagcagatcagcaggtacatggtgccgcggggccagtaaccgccccagtacgactggaacatgccggtggtcgataccatcaggatgatcagaacgatcaccgagacggcctgatggacgaagtcgaaccgcggcggacgctgtcgttgtccagcctgatgcagcatctgtcgaaccgggatcagcagcgagcggccccagggcgacagcgagccaagaatgaacaggccgtacagggttgcgcgcggccaggcctgagcgatcagcgcgttgatcatcgccggcacggagatgagcagcaccagcagcaagccgacaccggccagttggtgattgaaactgtatcgcgatggctcgttgggtagcggcgcggcgccctctggctcggggatcaccaagctggtgatcaacccaggcaggatcaacagcgcgaaggcgacataggtggtggcccaggcggtctggctataatccaggttggtcgagcccagccattcggcgaggaacagcgcgccggcgctggccagcagcatggcgatgcgatagccggtcatgtaactcgcggccaatgtcgcctgcagcttgtcctcggcgatttccaggcggtaggcgtcaatggcgatgtcctgtgtggccgaggcgaacgccacggcgaccgccagcgcgatcagcagggccaggttgttctgcggattgcacagcgccatgccgatcagcccgagggcgatgaccgcctgcgacagcacgagccaggaacgccgtctgcccaggccgccgatccagggcagccgccattggtcgagcatcggcgaccagacccacttgaaggcataggccagactgatccaactggcgaaaccgatggtttcgcgcgataccccggcttcacgtagccacactgaaagcgtggaaaagaccaggattgctggcagacccgcggcaaagccgagcaccagcagtgtcagcgaggcggggctggcataggcggcgagtgcggcacgccaggtttcacgggacataaagcagatcagagccaggacatgaagggcgcactctacccgctgtgctccgccgaatgccagccgtaccgacgtatgtcgacccggtcattgacgatggtgattccctcggcgcgaaggcgcatgcgttgctcatgtccggcagccgtgccggccggcaggctgagccgcccgccggcgccaatcaccctgtgccagggcaggctggtaccctccggcagctgtgacatcagccgaccgacccagcgcgccgcgcgaccgagcccggccatggcggccacttcgccgtagctgacgactttgccctccgggatctgcgccatcaccagatagaccgccgagcgtcgggattcggcatcggcaccgggcggtagcagaggcgggtgttcggtcatgcgggggcttcctgtgtgcagtccggctcagcgggagcggcgctgaactcgcctcccattcggcggtcagtgcttgctgtaaccaatcgcatagggataatgccagcctttttaaccgctcctgcgcagaatttcagcccctatgttttccagaaccctgctttgcatgtctctctccatcgtcacgcttccggcactcgccgataccgtctggctgaagaatggcgaccgcctgaccggcaagatcagcgtcctcgacggcggcaagctgctcatcgaaaccgaatacggcggctcgattccggtcaagtggaagcaggtcgcgacgctggaaagcgatcagcaactgttgatcaggcaggacgacatgaccggggacgtggccaagtcgctgcaggccgccgacgatggcaaggtcatcctgagcaatggcggtgcgccgcgcacggtcgagctcgccagcatcacgcaaatcatccatcccaaacctttgatccaggacctgacctggaagggcaatgtggacgttgcggtggactacaagcgcgctgaaaccgacaccgatgactacgacgtttccttcgacacctcggctcgtcatggtctttggcgccacaacgcaacggcgaactacaaccgcgaataccgtgacggcgtgaccgcgacggacaactgggatgccgaatacgccctcgaccgattcctcgacgagcactggttctggcaggggcggctggaatacaagcgcgacaaggtcgaggacgttcgccgccagcgtactctgggtaccggtccgggctaccagttctgggacaacgaactgggcgccttctcgttggcctcgctgctcaaccgcagcgactacgagtttgccaacggggacaaggaagacttctattcgctcgcgatgaagtggcggtacaaccgttacctggtgggcaagacattcgagctgttcagcaacggcgagatcggcaagccgctggaaaacgtcgccgactacgagctggatgccgaggtgggcctgcgctacaaggtcaccgactgggcgtcgctgaacatgaaagccgagaaggacatcgtcagtggcgcggaaagcgagctcgatgaaacgcgctacagcatcggcttcggcatcggctggtaatcagcggctgttgcagaccgggcgctcaggcgcccggtttcgtttcaagggttcgatcaaggggttacaaccgtaggccgccgtccagctcgagtacgcgcccggtgaaatagtcgttttcaaagatgtaggccaccgaatgagcgatctccatcggtttgcccagacgcttgagcggaatgccggcggtcatcttttccagcgcctcgggtttcatgctggcgaccatctcggtttcgatgaatccgggggcgacgcccgcgacgcggatgccatagcgtgcaagctccttggcccagaccaccgtatccgccgcgacaccggccttggcggccgaatagttcgcctggcccatgttgccggcacgcgagatcgaggagatattgacgattgcgccctggcgcttgagctcgatcattttcgctgcgacttcacgagtgcagaggaatacgccggtcaggttgacgtcgatcaccgcctgccactgggccaggctcatcttcgacagctcgccatccttgaccttgatggtcaggccgtcgcgcaggataccggcgttgttgaccaggccatccaacgccccgaaatcctcgctcacctgggcgaccatgtggctgacctgctcttcgttggcgacgttgcacagataggcgcgggcttcgcctccggcgttttcgcaggcggctaccgcctcgttcaggcgatcctggttgagatcgaccagggccaggcgggcgcctttgccggcgaggtattcgcccattgcccggccgaggccctgaccaccaccggtgatgatgatgaccttgtcttttagctgcatgcccatctcctctaattgcgcgcggatgccgaaacgacgcctgccgatgaaaccgttatgctgtgctcccgtcgaaccgaacgagccctcaaggagccgccgtgagcgctgaagccgccaagcatgcccgacaactcctactcaaggaataccgcgccgtactctcgactcactcgaagagcatgcccggatttcctttcggctcgacggtgccttattgcctgagcgaggagggctggccgctgattctcatcagccgaatcgctcagcacacgaaaaatctccaggccgatccgcgatgctcgctgctggttgccgagcgcggcgccgaagacgtccaggccaaggggcggctgaccatgctggcggaggcgcgaatgctcgccgagcccggccaggtcgaggcggcggcagcgcggtactaccgctatttcccggagtcccgtgattaccatcgggtacacgatttcgacttctggatattgcagccggtgcgttggcgctatatcggaggcttcggcgcgatccactggctggaagacgtcgcgctggccaatccattcgccgcagccgagggcggcgaaagcgcgatgctcgaccacatgaacagcgatcacgccgcggcgattgcccattacgtcgacagtgcagggctgccttccgaacctgaggccagcctggtcgggatcgacagcgagggtttccacttgcgcataggccaggccatctactggctggcgtttccagcggtctgcgccaacccgggcgcagtgcggcaggcgctggtggcgatggcgcggcgctgattcaggctgacgtaagcgcaggggtgaataatccggttacagcctgttgccccgatgggttgaattcggctcaggctgacgtcatctacacgagatcggaagccgttcttccgccaaggactatcgatgcgaatcttcttactgctgttcctcctgtttccgctggccgagctggcattgctgatcaaggtcggcagctcgatcggggtattgccgaccatcctcctgctgatcatcagcggcatggctggcatcctcttgttgcgtctggcaggcttcgccaccgcttggcgcgcacgtgagcgcctggcccggggcgagttgccggagcgtgaaatgctccagggcctgatgatggccatcgccggtggcctgctgttcctgccgggttttctcagcgatatcgtggcgttgctggtgctgttcccgccgactcgccggctgttcctcaacttcctcggccgccgtgtcgaagcccaggcccaacgccgtcgggcttttgccgacgacctgcgtcaacagcaggagcgccacgccggatcacaacgaccgaacgtgatcgagggcgagtgggaacgccgcgacaagtgagagctttccctcacgaaaaggcatgcgcaggcatgcctttttcattttctcgtgcaaaaaaatcgacgcggtgcccttgaaatcatttttgccgcccgcatgtagcggtcaccgcaaggtcgctgtcgtgattcgacagtccgtcttctgcggctcgcgttgcgggccgcaaccggcatagccggatttgcccaacccgccggtgagaatgcatcggcatggaaaccactgtactaggagagatcgacaatgaagcttcgtcctctgcatgaccgcgtcgtgattcgtcgcagcgaagaagaaaccaaaaccgcaggcggtatcgtcctgccgggctccgctgccgaaaagccgaaccgtggcgaagtcgtcgctgttggcactggccgcgttctggacaacggcgaagtccgcgccctggccgtcaaggtcggtgacaaggtcgtattcggcccttactccggcagcaacaccgtcaaggtcgacggtgaagacctgctggtgatgagcgagaacgaaatcctcgccgtcgtcgaagcctgatcagcgctcgctgcctagcgaatgcgttccatcaacagaatttgaggaagaatcaacatggctgctaaagaagttaagttcggcgactccgctcgcaagaagatgctcaccggcgtcaacgtcctggctgacgcggtaaaagcgaccctcggcccgaaaggccgtaacgtggtcctggaaaagagcttcggcgctccgaccatcaccaaggacggcgtttccgttgccaaggaaatcgagctgaaggaccgcttcgagaacatgggcgcgcagctggtcaaggacgttgcgtccaaggccaacgacgaggccggtgacggcaccaccaccgccaccgttctggcccaggccatcgtcaacgaaggcctgaaagccgtcgctgccggcatgaacccgatggacctgaagcgcggcatcgacaaggcgaccatcgccgttgttgccgaactgaagagcctggccaagccgtgcaccgacttcaaggccatcgcacaggtcggcaccatctccgccaactccgacagctccatcggcgcgatcatcgcagaagccatggaaaaggtcggtaaagaaggcgtcatcaccgttgaagaaggctcgggcctggaaaacgaactgtccgtcgtagaaggcatgcagttcgaccgcggctacctgtcgccgtacttcatcaacaagccggacaccatggtcgccgagctggacagcccgatgctgctgctggtcgacaagaagatctccaacatccgcgaactgctgccggtgctggaaggcgtcgccaaagccggtcgtccgctgctgatcgtcgctgaagacgtcgaaggcgaagccctggctaccctggtcgtcaacaacatgcgcggcatcgtcaaggttgctgccgtcaaggcgcctggcttcggcgatcgtcgcaaggccatgctgcaggacatcgccatcctgaccggcggtactgtgatttccgaagaagtcggcctgagcctggaaaccgctaccctggagcacctgggtaacgccaagcgcgtcgtgctgaacaaggaaaacaccaccatcatcgacggtgctggtcagcaggcggacatcgaagcccgcgttgcacagatccgcaagcaggtcgaagacaccacctccgactacgacaaagagaaactgcaagagcgtctggccaagctggctggcggtgttgccgtgatcaaggtcggtgccggtaccgaagtcgagatgaaagagaagaaggcccgtgtcgaagacgccctgcacgcaactcgtgcagccgtcgaagaaggcgtggtgcctggcggtggcgttgccctggtgcgtgcgctgcaggccatctccgagctcaagggcgagaacgaagaccagaacgtcggcatcacgctgctgcgtcgcgctgttgaagcgccgctgcgtcagatcgtcgccaacgccggtggcgagccgagcgttgtggttgacaaggtcaagcagggctcgggcaactacggcttcaacgctgcctccgacgagtacggcgacatgatcgagatgggcatcctcgacccggccaaggtcacccgttctgctctgcaggccgcggcgtccattggcggtctgatgatcaccaccgaagccatgatcgccgaagtggtcgaagacaagccggccccggctatgccggacatgggcggcatgggtggtatgggcggcatgatgtaagccgaccagccttccagctgaaagaagccccgcctcgtgcggggcttttttttggctggcaatcagcgtctatctggccgagtgcccaacgatgcacgcgtgttggccctatggctacttgacttgtgccgatcaaaaaatgaccatcggtcaagttgttcggcacggtttgaatttgtcgactatcgtgagcttctcaactccacttataacaagagcttgcgtgatgaagcttgaaatcgcccgaggtttgttcttagccgcctcactaggcgtggcctcgctctgtgccgccgcgtggagtgaacccgacgccaagctggtcgcgcgtagcgacgtcagcgaacactgcccattgccgcgtctggctcaggtgacggggcctcaagcgcgccctgaccaggacctgctgctgttcatgtatgggctgtcgcagagcctggtaggccggggttaaccaggtctgcacgcatccgcccggcacgggcggatgcggctggcgtgagcaggcttacgcgacggcttcggaagctggtgcgcgatccgggctcgccagcagggtgtagacggccggcaggacgaacaaggtgaacaccgtgccgaccgtcatgcccgtggcgatcaccatcccgatatcaaagcggctcaccgctcccgcgccgctggccaggattagcggcaccatgccgaacacggtcgccgccgtggtcatcagcaccggtcgcagtcgaatcgccgcggcttcctccactgcctcgcggcggctcagtccgcgctcccgacgcagttggttggcgaactcgacgatcatgatgccgtgtttgctgatcagcccgatcaacgtcaccagcccgacctgggtgtagatgttcatgctcgacaggccgaggaacagcggaaccagcgccccgcagatcgacagcggcacggtgaccaggatcaccaacggatcgcggaaactctcgaactgcgctgccagcaccaggaagatgacagccagcgccagcgcgaaggtcgtgtagagcgcggtaccttcctggatgtactgacgcgacgcacctgcgtagtcgaaggtgaagccctgtggcgcttcctcctgagcgatgctgcgtagcgtgtcgatcgcctcgcccatgctgacgatcgggaagccctgaatggtcgccgcgttgagctgctggaactggctgagctgggtcggccgtgcgcggtcatggacctcgatcagggtggacagcggcaacatctcgtcccggtcgttcttcacgtagtaattgctcagccagcccgggttgtcccggtaggcctgttcgacctgagcgatcaccttgtagctgcggccttcgatggtgaagcggttgatttcgctttcgccgagcaacgtcgccagggtcacgccgagatcttccatcgagacgcccatttgcgccgctttttcacggtcgatgtcgacgacgatctccggtttgtcgaaggccagatcgatatccaggaaggcgaacttgccggacgcctcggccttttgcttgatgcgctcggcgacctgcagcagcgactcgtagtcgttcgcggtgttgatcacgaactggaacggcagtccttcgccggtgccgggcagggagggcaggttgaagccgaacacctgcagaccggggatcttgtcgatcttcgcctgcaccagcgggagcacttccatttgcgtgcgctcgcgctcgtcccacggcttcatcaggaacccgccaatgccactctgtacgccgttgaaaccgttgatctggaaccaggagtagtactccgggaacgacttgaagatctccaggaactggtcggtataggcgttcaggtaatcgaggttggccgtttgcggcgagctggccatcatgaagatgatgccctggtcttcttcgggtgccagctcgctttcggtgaatttgagcaggaccggaatcagccccagcacgatcacggcgaaaaccagcaccaccggacgggtattcagcgtgccgtgcagggcgcgctgatagcgtactttcagtcgatcgaagagcagatccagccggtgggccaggcccgtcggattctcttcatgacgtagcaggcgcgagcacatcatcggcgacagcgtcagtgcgactatgccggatatcagcaccgcaccggccaacgtcagcgcgaattcctggaacaacgcaccggtcagaccctgcagaaagccgatcggcgcgtagaccgccgccagggtgatggtcatcgtgaccaccggcatggcgatctcgcgcgcaccgtcgatagctgcctggaacggcgtcttgccttcctcgatatggcggtggatgttctccaccaccacgatcgcatcgtccaccaccagtccgatcgccaacaccatggccagcagcgtcagcagattgatcgagtagcccatggtctgcatgaagaacatcacgccgatcatcgaaagcgggatggtgaccaccgggatcagtaccgaacgcagcgaccccaggaacaggaataccaccacgatgacgatcaccaccgcttcggcgagggtcttcaccacctcatcgatggaggcctggatgaagcgcgtggcgtcataggcgatggtgactttcagactgggcggcagctgcgattcgatctgcggcatgatcttgcgcacttcgctgatcacatccagcgggttggcgctcggggtgccttttacaccgatgtagaccgaaggtatgccatcgaaagagctgatggcgttgtagctttcggcgcccatctccacgcgcgccacgtcgccgagcagcacgcggctgtcgcctcgggtcttcagcgggatggcggcgaaggcttcgggcgtcttcagttcggtgtcggcattgatactggtgacgacgtattgccccttcacctcgcccgcggcagagaggaagttgtacttgcgtaccgcctcgttcacatcgcttgcggaaaggccgtaggcggcgagcttcaccgggtccagccagaggcgcatggcgaagacctggttgccgaggatttccgcctcggccatgccgggcagggtggccagcttcggctggatcacccgcgacagataatcggtgatctgcgggttggtcagctgttcgctatagaagctgatgtacatgagcgcggtggaatcggcggcctgcttgttcagcaccgggtcctcggcgttctgcggcagctggttcttcaccgagttggcctggctcaacagttcggtgtagagccggtcggtatcggcgccgatgcgtgcgtaaaccgagatgaccgagagattctgctggctcaccgaggtcatgtagtccacgccttcggcgctggccagactctgttgcaacggttgagtgatatagccctggatggtttcggcgttggcccccggataggcggtggtcaccgtgatcaacgcgctttccatttgcgggtattggcgaatcaccaggctgttgaacgcctggaagccgagcagcacgatcagcaggctgatcacgctggccagcaccgggcggcgaatgaatggatcggtaaaagccatgacgatctgtccctgtagtcgacgcctcagcgggcgtcggacccgctgtttggctcgagttcgagcgtgcgcttctcggcgatcgcaacgtgggccccggtgtcgagtttgagctggccggcgatgaccacctgctcgcccgcctcgagccctttgaggatcaccacgcggccgtcacgacgctcgccggtctcgacgaagcgacgttccacgaccagataggggccgctgcgctcgggcgcttcggtgccttcttcgggttcgggcggctggccttccttcaccaccagcacggagttgccatacagcgtgtaggtgatcgcggtctccggcacgacgacacgaggctcttcactgggcaacagcacctgcaggtcggcgaacataccgggcagcaggcgctcgccggggttggccagctctgcgcggacctgcacgttgcgggtggtggtttccaccttggggttcagggcgacgatcctgccctcgaaatgctcgccgggaaacgcggcgacctggagccgtacgggctggtcgatggcaagcaagggcacctgctgttcggccagatagaagtcgacgaacagggtcgacaggtcctgcagcgtggcgatcggagtaccggcggcgacaaaatcaccgacatccacctgacggataccgatggttccggagaagggcgccagaatgcgcttcttcgccaggctggccttcaactgtgcaaccgtggcagcggccttctgcgactcggcgttgagccgatcgtactcgctgcgtgagatggcctggcgatcgaccagactggccgcgcgctgaaattccaccttcgccaggtgcaggtcggcttcggcggcggccaggctggcctgctcgatttcactgtcgagcagcacgatcggctggcccttgctcaccttttcacccgagcggaactgcacggcgctaatggtgccggcaatttccaccgacagatcgatgccctgggacgccgtgagcgtaccgatcgccggcagccggctctgccagggctggcggctggcctcgacgacctcgacatcgatcggcggcttgggtgccttgaattgctggatttgcgagtagatcgaattgaacttcagggcggcgaggatcagtaccacgacgatcaccgcgccgagcatgagcagcatgcggcgcaacattttccatattccttggagagatgagccggctgactactgccatgaaacgaggcagccgttcgggtgcacacaagcgatcgattgccggtctgacaggggcatcgatccggggtcgttccggcaaagccggcaaacagcgaaagtagcctcgaacaaggcgtatgtaaagggacaggtaaggaagttgtcggcaggctgtaacagggtgtgcaatcggcgaggtagagccctgcggggcgaggagcggggagggcaacgacccctgccgaagggccgttgcacccgtgtttggttgcgtcagccggcgaggcggtgcgtcacttcgctgagctgggcggacaggtcgtgcaggttctggctggccttttcggtgcgctcgacgttgtcctggttggtggtggcgatggcggtgatttcggtcaggttgcgtgaaatatcctcggccaccgacgtttgctcttcggcggcggtagcgatctgccggttcatgtcgcggatcgcttcgacctcctcggtgatacgccgaagcatgccgcctgcttccgtcacctgttcgacgccttcgtcgctgcggctctgaccgctttcgatggcacgcacagcatccaccgcgccggtctgcaccgtgtcgatgatctgatggatttcggcggtcgagtcggcggtacgcctggccaacgtcctcacttcatcggcaaccacggcgaacccgcgaccggcgtcaccggctcgggcggcttcgatggccgcattgagcgccagcaggttggtctggtcggcaatgccacgtatcacttccagcactttgccaatccgaccactgtccgcctccaagcgccgtatgacgtcggccgtgttgacgatctcgccgcgcatgagcgtgatcgtctcgatggtggaacgcatcatgctctcgccctgttgtgccgaatgatcggccgtatccgccgcacgcgcggcttcggctgcgtggcgggcgacttcctgcgcggttgccgacatttcgtgcatagcggtggcgacttgatcggtacgcgagaattgctcgcgagtgccctggcccatcaaggtcgcgatggcattcagttcgccgctggcgttgtccagatccgaggtgctgcgttgcaggcggatgaaggtttcggcaaggaaatcgcggagcacattggccgcgacggccagacgccccagttcgtccttacgggatgcatcgacgcgctcgccgaagttgccctggctgagcttggcgatgtgctcgatcaagtgactgataggggcgaccaggttgcgattgaccagccacaggctgagcaggctgatcagggcgcccgcggcaagcatgatcagcgaacccgtgatgatcgcctgctcagcgccacggctgatctcttcggagctgtgctgcgcggcgtcacgcagttgcacgaccagttcgctgagctgctcgctggtggcccggtcgatgcccttgaccgcggcatcgccggcaatgggatcaccgccagcggtcaggaacgcttcgcggccgcttcgataggctgcacccagcttccgatgttcatcgcgcaagccctgaatctggctcgccagcctctggtcgtggcggctcgcttgggcgagcgtctcgagcactgtctggaccttgcgttcctgctcttcgaagctctgccagtacttgttcaggttttccggcgatttgccgcgcagcagcacgttcttccattcctggacctgggtcttgaactcgagattggcttcattgataaggcgcgaggcctcgattgggcccttgagcagcttttggaaagcggagatgtcgtcggagagaaatgagaagctggccaaggcgatgaccagggtcatcaacaagctgccgccgataagcgccaacagctgagcacgcagggagtttttcaggagcatcgtgagcgtctcgcatcgtatggagggcacttgcgacaagggcaagggcgccgggcggtcattggaattaccgcccgggtcggccaacttttcggcgaaccgccacaatacttgagcgctttcagaccagccgcaggtggttgtcccataaccccgccggcagttgcagtgcggtgctgacgaagcgcccggcgctgcaatcgatcaggcgacaacggccttggcccgagctcactacgaagccttgcgcgactgccgcgaccccggcgcagtccggcagatggatctcctcgcgcagcgcggcgctgtccagatcccagaagaacaccttattgccacgtggtgccgtcacggccagcagacgaaggtcatcgtggattgccaggctggcggtgtactggttcatcgtctggcgttgcgcttcccccagcggaaaggcctggaaggcctggccggggcgcttgatcgccagcagcgggaccgcatccatgggatcgccctcgtactgctgtcccgacaccaccgtgccgtcggccgcgactgccagatgacggacgctgttcatctgctcgggcaactgctccttgctgaccagcgtaccgtcgcggtgcagcagcaccagactcggctccatggcgtcgaggttcatcatcttgcggctgtcggcttcggtgcggatgccgccgttggcgattgccagcgtctcgccatccggcatccagagcagctgatgcgggccaatgccatgggtcgaatgctcaccggtgcgaaccagccgtcgctcttcgacgcggtagatgccgagcacgccacggccggcgtcggcggtgtcgttctcggtgctgtagaaccagtcgccactggaatggaacaccccatgcccgtagaaatgccggtcgggcggagaggctagcacctgcagcagcgtgccgtcacggctgtcgatcagatagctttcacggcttggccgccgcccaacgaacaccgccagcggcagatgcgggtgggcgtagacgtcgtggcagcgctcattgaccggggtggcgaacacgcgggtgccatctagacgatagcccaccgcgtagtggcggccgccggcatcgtcacgcgccgagagcagtagcggctgctcggtgtgccgggtgagtgtccagccgccaacggcggaggctgccaccagggcgccgcccagacccagaaaggcacggcgtttcatcatcagtctccgtcgtgagcgttgaagccgatctgcacgcctagcgcgcgggccaggtcgctctgatgcaggcgatgcagggcgtcgatctgctggtacagctcatccagccgtgcgcgcccggcttcgtcggcaatcagctcgctgaagggcaacatgatgtcggcgatctgcttgcgcgtggtggcgtaggcgacgtcgatccgcttgatcagctcggcctgttgcgctgggacgagctttttcagaccgttgtcatcagcgccttgccaaagctgttgggcgccggcaagcgcggcatcgatgctgccgagcgtcgcatcgctgcgccaggcttcggcctggaacggctgtggaatgcctttgctctgccgaccaagcggtgcgcccagtttctttttcaagccatccagcgcggtgacctgcacccttagcaggtcggagattgcttccttggagtcggcgtaacgctcgttggggaattcgctcagctgcgtgaccatcccatctttgccttcccactgctgcaggatgttggcggtcagcttctgctggtgttcgccgatggcctcgagcaagcggcagtagcgtgccttggtctggctgtcgttgaggtcgaccgcctcgtcatacagcacgtattcgtatgccgaaaggccctgcaggacgacgctgccgttttccaggtcggcctgggtcagctcgggcttgtttttcagcagagcggtcacctgccgcccgaccaggttcttcttgtcgggccagaactgcacctgccaggcgcggttgccttcgcccatcggcccgaccagcatcggctgcaagcccgcccaggcgaactgcgcctgcaagaaggcttcacgcgcatcagccagctcttcgttgccagcacagaacgcgatactgctggcggccatgcggcggttggtttcggcccactgggtgtaggtcggatgcagcacttcgtccaccagcgtcttgctggtttcggcaaagggatccgatggtgcgcatgcgctgagaagcagccccagtgcggtggcggagaaaacggagacgagtcggttggggtacatgttgctcctcggcaggtcggaccgtccgacgctagagtgattcgagaaaagccagcaaggcgttgcgctggtcatgatcgaggccgagcacgtactgcttggcctgttcggcttcaccgccatgccagagtacggcttcgagcaggttgcgggcgcgtccgtcatgcaggaaatgggtatgtccgctgaccgtttcagtcatgccgatgccccacagcggtggcgtgcgccattcgctgccgctggcctcgaactcgggccggtgatcggccagcccatcgcccatatcgtgcaacagcagatcggtatagggacggatgatctgattggactgttccggctcggcggcttcgccggtggtgaacgtcgggacgtggcaaccctggcagccggcgcgatggaacagcgtcttgccttccagcaccatgggatcgttgacgttgcgccgtgccggtacgccgaggttgcgtgtgtagaacagcacgagccggagaatgttgtcgctgacctcgggctcgccgccgtggggcatcgcccggcattgcggctgattgtccgtacagctgctgcctgtgaagaggctggtggacagccccatgtcattgaaaaaggcgtcggcgttctgctggttcagattcggctgcccggccttccagccgaagcggccgatcgccgtctcgcctgtgcgttgatcgaagacgcgattgggacggccagaaataccgttgccgtcacggtcgtccggatcggcattggccagtagcgccgactctgggatggcttccagcaatccaaggccgatcatcgccggagcgacacgaaccgagaactgggtctgcggatgcatcggcccgtaacccaacgcggttatctccagctgcgggacgcgcagttcgacttcgaagccatcggcgaaacgctcggtgcgagtgctgtactggagccgaaccttgccttcgggagccacgccggggatcgccatgtcctgcagctgtccgccataggtgggttcgggggcgatgccacgctgccggagcacttcggtgtgctccggcccggcggggaccgatagccgcacgagcatcgagaccacattgcgctcagcctggggcggacgaccacggccgtccttgatgtggcagttctggcaggcgttggtattgatcagcgggccgagcccgtcgcgcgcagtggtcgacgaaggggcgattacccagggattgcgaaagaagctgttgccgacgctgaagtccaggcgccgtaggggtgtcaggttggcagaaggcagcgagaagctgttgtggtcgaatctcgtcacggtggcgtcaccggcagatagcgcctcgcctgcttcggcctgggtgaaacgcggtgtctgctcgttgcaaccggccaggacgagggccagtagcaggggggtagcagcacgaaaaaacgggtgcatcgaaggtaccagcgcctgacaggggcgcaatcttagcaggctactggagcttgaataatagcaatttgcatttgcccgtcacctcgtcgaggcgaagcgggctcagcgcaaggaacgggcggcatcgagccgcccgcttttcctctgcaggatcagaactgatgatcggcagtgtccggattcagatcgccgatgcccagggcggctgcggctttctctatggatgcggtctgctgaaccagcgcgccgatagcagcgcgtaccttcgcctgcccctcgctattgtcggggccgatcaactggtcgaacgcttcgccttgctcggcactggtgaccagcgcctgcagcttggcttcggtcgtttccaggtccgttttcaaggtgctgttcagttgcgggtcggtgccttcgaccaacgaggcgaggctcggaccgctgagcgtgctgccgtcgacgcgacggtactcacccaggtagacatttcggatgcctttggcgttgtagaaatgcgagttatgcgtgttgtcgctgaagcaatcgtgctcgtcttccggtgagttggcttccagcgccactttcatgcgctcgccggccagctcgccgagcgacaggctgcccatgccgaagaacatcttgcgcaagccgttctcggccgattctttttccaggctggcgcgatagttgtcggcgacgccggccttccattcgttcaccatctcttccaggtcgctgaccagcagctcggtagccgctttcaggtaggctcgacggcgatcgcagttgccgcctgtgcagccttcgccttcgatgtagtcgctgacggggcgcttgccggcacctgcgttggtaccgttgaggtcctggccccagagcaggaattcaatcgcgtgatagccagtggcaacgttggcttcggagccggccagctcgttcaggctggccagtttctcgccggtgatctcgctgacgtcgatcttgtcttcgccgatctgcaattgcttgttggcgatgatgttggccgtggcgcccgggttacccagcgcatgctggtagtcgccttcgacatagtcgatcaggccctcgtccagcggccaggcgttgagctgaccttcccattcgtcgaccaccgggttgccgaagcggaacacctcgctctgcatatagggcacgcgggcggccagccaggcctgcttggcagcctgcagggtttcgtcggtcggattggcgagcaacgcgtcgactgctttttgcaggtccaccgcggtgctgtgcgcatcgctgaaaatggcgtgcgctatgtccgcatagtgcttgaccacagcttgcgcggcctcgtcgttcaaggtctcggtcgcgggcgcgctcgtagccggctcgctttgagcggcttgcggagcggcggcctgttcggctggcgctttgtcttcgccgcaaccggcgagtgaaatagcgacggccagtaggctggcggtggcccagacgggagtgcgtagcatggcgggttcctttgcttgcaaatgatggatacggacgtcggctcgcagcagcccgacggctcgatgcgggtcataatgcgaaagatttgcattttgtgcaaagaaattgcgtgcgccgggtcgcgcctcgtcatgcttggtgcagttggaacgccatctcgatggttggattcggggccgcacctatacgcgatgtgccgcctcgttcaggccgcttcgttcatactgagagcgcgttgcggtcagacgtcctgcgcgtcactggacggttcgacgacgacgccctctcgcgttgcagcgctcggttgctcgccagcggcctggcttgatttctccccatacatcgacgcatcggcatggttgagtagcgatgcttcatcgtgtccatgcgtgggaaagtaggcgatgccgatgctcggttgaaccgccaggctcaggccggcgagctccaccggcgcctgcatggcggcgcgaatgttcgccaccaccaccgccgtatcggcttccgaggggctgttttccagtaacacgacgaactcgtcgccgcccatccgcgcgacggtgtcggcttcgcgcgtgtgctgggttagccgactggcgaaggcttgcagcagcaagtcacccacgccatggccgtggtgatcgttgacctgcttgaatttgttcaggtccaggtagagcaacgacagccgctcgccgttgcgacgagcacgcgccagtgcggttttcagcgtggcgaagaggaacgcacggttgggtagaccggtaagctcgtcgtattgggccattcgttccaagcgagcatgcagttgtttgcgctcgatcgctgtcgccacctgattggcgacgaattgcagcagatctcgatcctgctcgcgataggccacgttttgcgccgcatcgttgagcagcagtgcgccaatgttgccttgtcgactggacaagggggcggccagccagcagtaacggtcggtatcggcgatcgtcttgaggtggctgcacacttcgtcacgatccttcgtcagtagcagtgcctgcccggtgcgggtgacctccgcgcaaagcgcggccaccgactcgagcgggaacggcgccggatcgcaggtcttgcagtacggaaagctgggcggtccgagaccaggggtgttcagcgcgacaaaaaaactcgccgccggtatcagcttgccgatgatcaggtggatctgctcgaacagggcagtgagatcggccgtgttgtgcgccgcttcggagagcgcatagacggcggcctgcagggattcggagtgcttgcgctgggtgatgtcacgcgcaacacccacccgcagttgatcttcctcggaccaacgggccgaccacatgatgtccaccagctggccatccttgcgcacgtagcggttctcgaagtgcaggctgggttgaccggacatcaccagcttggccgcctggagcgtgcgctcatgatcttcgggcgcgaccatgtccatcatcgagcgaccgatcatctcatccggtgtatagccgaagatgcgctcgcatgcggcgctgacataaacgaagcggccgtttacgtcgacgacgcagacagcatcgagcatgaggtctagcaccgtggccaaggctggccgattctctgctttcatcgtacgtaactactgaaacctgcgaacaacaatcgacacgagccgaattgagtgtagcggagccagtgatgtggcggcgtacaagattgatggctaagtgctatcttttttgctgtcgttgggcgacttcagctgcgcttttcggctatccagatggtgtgtcgagtcccacgattgccatgggcgaatacctgcacctcttcggcctggaatcccgatcgcgacagccgttgggaaaaggcgcgatcggcgctggccgaccacacggccagcaggcctttggggcgtagcgcccgggcgcaagcatcgagcccctgtgacgagtacaaccagctgttacgcttgctggtcagcccttcgggaccgttgtccacatcgagcatgatcgcgtcgaagccttgtcgttcgccgttgaggatgtcggcgacgtcactgcggatgacgcgggtgcgtggatcatcgagcggcatgccggccttttcgcccagcggcccgcggttccagtcgatcacgccgggcaccagttcggcgacctgtacctcggcatcgctgcccaggtgcctgagcgccgaggcgagcgtgaagcccatgcctaacccaccgatcaacacgcgtgcctggggacgcctggcgatcctggtgcaggggatctccgccagcgcgtcctccgagccgtgcatgcgcgagttcatcagctgattgccgttgcctccgcggatcttgatgacgaagtcgtcgccgtaactgaagaggcagagggcgccgtccgtgttgggaatctcggcggtgtcgatgagtacgaaacgcttcatgcgcatggcccataggtgggggagtggacgcggtgccaggcgcaccgcgtggtggcgctaagcgttacaggggctgcgagttgagtctgtgttcgatacgcagggattggcgcagcagtgtgaccagttcggtcgccggcaggggcttgctgtagtagtagccctggccttcgttgcagccttcgtcgatgaggtaacgctcctgctcggcggtttccacgccctcggcgatcaccagcatgccgagactcttacccagctggatgatcgcccggacgatggtggtgtcaccctcgtccacggccatgtcacgcacgaagctcttgtcgatcttgatcttgtccagcggcaggctcttcaggtagctcagcgaagaatacccggttccgaaatcgtcgatggcgatcagcgcgccggagcgccgcaaactgtgcagattgtgggtggcggcggcgatgtcttccatcaggccggtttcggttacttccagctccagcgtttcgggtggcagctgatgggtacgcagcaggttgctgatcatctccggtagctcggcgtggtgcagctggacggtggacaggttgaccgccatgcgcagattaccgaagccttggcgatgccattcgctcagctggcggcaggcttcgtccagcacccactcgccaatgccgagaatgctgccgttctgctcggccagggggatgaagacgtccggcggtaccatcttgccgctcggatgcgtccagcgcagcagcgcttccacaccggtaatgcgcttaagccggtaatcgatctgcggttggtagaccaggtggaactcaccgcgtttgaccgcttctgccagatcgttctgcaaatcccgccgcgcccgcatctcgctgtcgatgctagcgacataaaactggtaacggttgcgcgagcggcttttggccagggtcatggtctgctcggctttctgcagcagcttctcggtgctgtcgccgtcttccggataaagggtgatgccgatcgtggcgcgcaggcgtatgggttgctgatcgagcacgaccggccgctccaggtcgtcgagaactttctgcgccagttccgccgcttcatagggctgctcgaggccgaacagcaccagtacgaactggtcgccgcccagacgggccagcgccccgacacggccactcagtgcgcgcaggcggtcggccagcgccctcagcatgcgatcgccgttctggtagctgtattgctcgttcaggcccttgaagtcgtccaggccgaggcagagtaccgccacccggcgctggacccgggccgcttcgccgagaatgttgtcgagttgctgctgcaattgctggcggttgggcaggccagtcagcgagtcgtactgagtcatgcgctgcaggctgttctccgcctcgtggcgcaactgcatgttgtgttcgatggcggcgagcaggccattggcagtctcgacccagagtcccagctcgtttcgctcgtggcccttgggcatgggcagggaatgttcgccggggcggcccgggtcgatgcgtgacatgtgctcgatcattctggtcattggccgcgtcagcagccactcgtagatcaggtagagcaacagccccaacaccagcgcccggagaatgccgatgacgaaaatcactgcggagttgctgatgaaatccgctccgtaaagcgcggtatccagcgtgatgcgcaggtcgccgtaatactcgttataaggcgggcgcccgatcagcgggatggaaaaggcctggtcccggccgagtatcgggtcggtcacccagcgcgatggcagcgacagcaacgggcgggatttgaacgccaggggctcgtcgcccggctgaccgatcgacgcctcgtgaatcgattcgtgctggaacaggccctccatgacctgcgcgcccatttcccggtcgaggctgtaaatggcctgggtggaaggatcgcgggtcatgcgcaggattcgctgcgcctcggcgttgatcaactgacgggtcttgtaggcatcgaagacgatctgcgcgcaactcagtatcagcccaacgccaagggcggacagcaggacgacacgaagcagcttcctcgacaggctgttgcgcgatgcggtcaaaagaatttcctttttccaggccgggtgccagcgcaagtattggtcgtcatagatgaggcgtcaaaggtcgggcatggttataagcggcgacgttatcaaaagctgcgtaggggcagcaggtccttccgtcgaccgccgtcacgccggctccaatcctggcaaacagcgtgtcgcgcacgaccatcttgccgaatcagctcgcgacggcggcctccttcacctcgcaccccttgatcaccatgcgaatgatcgtttcggcggccgcttcgtagtcggcatcatcgagcctggcctttcccgtgaccgtggaaatctgccagtcgaaatcggcataggtttgggtggcggcccagatgctgaacatcagatggttgggatcgaccctggccatcagtccctgatcgatccaggcctgtatgcgggcgacgttgtgactggcttgagcattcagctgcgcggcgcgctcggcaggcaggtgcggcgccccgtgcatgatttcgctggcgaacaccttggatgcacaggcgtgttcgcgcgaaatgcggattttggtgcggatgtaagcgcgcagcacatcggccggttcgccaggttggttgaacggggcggacgcccgcagcaatggctcgacaatgctgtcgagaacttcgcgatacaggttttccttactcttgaaatagtaatagacgttgggcttgggcagcccggcgcggttggcgatatcgctggttttgctggcggcgaagcccttttcggcgaactcttcgctggcagcgcgcaggatcagttctttgttgcgctcgcggatactggacatagggcctgttcatttcgtgaccacccagcctggtggcttgcgccgcatcctagcatcggccttcgaggcgcctcaaggcagccggcgagttggagatttgtgatctgtttcttggatttttgtatacaaagtttcaggtccgtttgttactgtgcgttgcgccgggccctgtgcgccaggcgggtttcggcagccgcgctggtcgaatacaaggaaccgtatccatgaaaatcctcatcgcctcgcttgcgcttgcattgtcgacgaccgctttagccgagcagagctatgtaataggtgtcgaacaggccgactttctgccgcattacagtggcgacagccaaggcaactatcgcggcttcgcacgcgagctgttcgatcgtttcgcggcgcaggccgggatacacatgacgctccgcgtgatgcccgccgatgccttgctcccggcgctgctcgctggccagatcgatgcaaaatatcccgacaacccgagctggtcggtgcaggcgaagatcggcccaccgttgcactacagccagccggtggtgaactacgtggacggtgtgctggttccgcctcgtcgcgtcgggctgggcatcgacgagctgaggcgtttggccgtcgtggacggctggacgcccagaggctatgaagaccgtgttcgcacgaaccaggtgcaactggtaagcagcaaaggcttgccgcgcatggtccgacaggctttgctcaaggataccgatggcggctattacaacgtcgtggttgcggcctattacctgaataacctgcgcgccaagccgggggtgttggtgttcgatcccggcctgccgcatacccgcggtacgttcaatctttcaagccgcgagcatcccgaattgatcgatcgtttcgaccgttttctcgacgaacaacgggccgaagtcgccgcgctcaaggatgagcaccaggtagaggccaacctgtcctcggaatacatcgggatggagcagtggaaggtcgactttctcgagcgccaacgactcaagcacgcctcaggcggctgagcagggcgcgtcgctacctcgaacgagcccgtgggttgcccgacgccggaccgtggatgcacggataattcggccaggcgtagtcgcttgattcttctcatgatcctgagccaatcgacctcggaataatggcgctgaacggtcataaagaccgaaacgttcaggccgatagcataatgatgctagcgcttttgctgtatacaaacttaagtatagttgtgtaccgcagaacaataacaaccgaggtcatatcatgccgttcatgcaacgcagtattcagtggcagctgattgtcagcatgggggcggcgctgctcaccagcatgctgatcgtcatcctggtctattcgtcggcggtcaaccggctggcggagcgctacctggtcgggcaggcgttgccggccaacgtcgccgcgattcgtaacgatatcgaacgaaccttggcggcgccgattaccgccacggccggcattgccggcaacagcctggtgcaggactggctgctgaacggcgaaagcgccgacctcgccgacgccatggggcgctatctcaatggcgtcaaggcgcagcagaatgccctcgccacgtccatcgccgtactggacagcggcaactactactcggacgccggtctgtcgcgcacactcagccgccaggctgcgggtgacggatggttctatagcctggtcgacagtggcatcgagcggcgcttcgagatcgatatcgacaaggcgtctcggctgccgacgctgttcatcaaccaacgcatcgaggcaggcggcaagacgctgggcgtcgccgggctgggctacagcctgaaaagcatgtccgagctgatcagcaacttccacttcggcgagcgtggcgaggtttatctgatcaacgccgctgggcgcgtaaaagtgcatccgcgtaccgagaacaacgaccacaccgagctcagcgcgctgatcggcaccgaggcggcgcagcgactgctcaatggcagtcacgatgcggtgcgcttcgaacgtgacggcgagacgttcctggccatcgctcagccggtggaaagtcttggctgggtgctggtcagcgaggtaccggaggcggagatcttcgccgaggcgcgccatacgctatggaccatcagcctgatcggtggctgcatcgcgctgttcttcctggccctggtggtggtgctggcacgagggctggtcaagccgattcgccaggtcacccacgcccttgtggagatcggtgggggcggaggtgaccttacacgtcgtctggatgaaagccgtgccgatgaactgggcgatctggcccgcggattcaaccgcttcatcggcagcctgcgtgagttgatcggcgatgtgctcaacaccagccaacagctgcggacggctgtggtgcaggtggcacaggtggtcgacaataccgccacgcgtgccggacgccagcatgagatgaccgacatggtcgccaccgccgtgcacgagatgggcctgaccgttcaagagattgcccgtaatgccagcaatgcggcgcaggcttcgcaaggcgctcgcagcgaagcgatgcaagcgcgcaaggtggtcggtgattccattgcgcatatcgagaagatgtccagcgatatcggccatgcggccgaatcggtaacggacctggcgcagcaggtggcgtcgatcgacaaggtgctggcggtgattcgcagcatttccgagcagaccaacctgctggcgctcaacgccgccatcgaggccgcacgggccggtgaaatgggccgtggcttcgccgtggtggccgacgaggtccggacgctggcgagccgtacccaggcgtccaccgatgaaattcagcaaatgatccagggcctcaagagcggcgccgaaaatgcggtcaactcgatgcatgcggggcgggcggcgaccgggaccggcgtggaggccagccagcgtaccgggcaatcgcttggcgcgattaccgagcaggtcgaggcgatcagcgacatgaatacccaggtcgctgcggcaacggaagagcagagcagcgtgaccgaggagatcacccacaacgttcagggtatcgccgatctcgcccaggccacggccagcgacgtgcagggttgcctcgaggactgccaggcactgagccgcctggcggacgacctgagccggcagatgggcagcttcaaactgtaagcctcgatgcgcgccctcgctcagcgagcgtcggcgcgcaggaacttcatgacggtgtagcgcttgagccgcagggcggtcgtctctacaagggagatactgctctccgctgccggcgcgtttgtcgggacgcactcagcgttgagcgaggcgaaaaaaaaggcagcccgacgggctgcctctcgatcatcgctgctggatcagaagtgcgccttgaccagcaggctcgcggtgttctggtccgtggagccgacgaagttgcggctgacgaagccaccgtcctcgatgccgtacttatccgaccagtagtcgtactcgataccgacatacagtttgcccggctcgccgtcgagcgccttgcccaggtcgtatttgatctgagggttgatgtgcaggttcttcgaaaggaagtcaccgcgacgctcggaaccggcatcgttgaccacccagtcgatatagccgtcgaacaggatgtcggacttgcccaccggaatggtcatggcccaggtgggcgtgatctgccactggcctgagggcttgccggtggtgccatcgggcttgcggtagtagacgttgatcgccatgcgatcgaagccggggacgttcaggtcgactgccgggccgagcagatagttctggttcggcacgccgttggtgctttcgccgcgctcgtaagtagccgccagcagcacgtccttgatcgggccgaagctcaggtcctgtccggtcagcttgccgaacgacaggcgtgggctgaattccccgtagtaggtatggccgtcgttgccggacaggccgttgtaccacttgttgtcgacgaacaggaacatgtcgccccagctccagccgctggcatgttcgaaggtgatggtctgttggatctcgccggcatcgaccttgaagttcttgccgtacagataggtcaggctgttgttctgccattgcagcataccgtcggcgaaggccggggcggcgagcaggctgccggccagcgccagcgagaggggagcgagtctgaggttcatgttggtgccctttggttttgttgttgtgatgaagcggcgttgcgcctggccgcatcgcgcccaggcgtcgatagcggtcaacccgttggggtcagttgctggctgaggtcggtggcggtcgccctggcgccgggctcggcatagttggggatgttgacggccagcgtgttggtgccgagcgagtcttcgatcaggttgtccgggtcgtagtcgtcctgttcatccgcatcgcgcggcaggaagaagttgagcaggatcgcgctgaaggcaccgatggtgatcggcgagccgaagatgttcttcagcacctcgggcaggttggtcagcacttccggaacagccgccacgcccaggcccaggcccagcgagatcgcgacgatgagcatgttgcggcggttcaggcctgcctcggcgagaatcttgattccggcgatcgcgaccgtgccgaacatgatcagcgtggcgccgccgagcaccggcttgggcatcagctgcagcacgccaccgaccaccgggaacagtgccagcagaatcagaatgccggcgatgtacagcccgacatggcgactggcgacgccggtcagctgaatgacaccgttgttctggctgaaggtggtcatcggcaggctgttgaaggtggccgccagcagcgagctgcagccgtcaccgaggatgccgcccttgatgcgcttgagatacagcggccccttgaccggctgacgcgagatcatcgagttggcggtcaggtcgccagccgtctccagcggcgtgatcagaaagatcaccgcaaccgggatgaacgccatccagtcgaaggcgaagccgaacttgaagggttgcggcacgctgaccgccggcagcgcggcgagactggagaaatccaccatgcccatcatccaggccgcgacgtagccgaccacgagcgcgacgatcactgccgacaggcgcagcaagggaatgccgaagcgattgaggatgatgatggtgccgagtaccaggcctgccagcgccaggttctgcagtgagccgggattctcgacgccgtagccacctgcgatatcggtcatggataccttgatcagcgacaggcccatcaggctgatgatggtgccggtgaccaccggtgtgatgatccgccgcaatttatcgatacagcggctgacggcgatctcgacgaacgcggcgcagaagctgacgccgaacagcgtggcgagtatctcttcgggactgccgccgcggttcttgacgatgaagcccgcggcaaggatcacgctgagaaagccgaagctggtgccctgcaggcagagcatgccggcgccgatagggccgacccgcttggcctggataaaagtgccgatacctgagacgaacagcgccatgctgaccaggtagggcacgtagtcgcccaggccaagcacgccgccgatgatcagggttggggtgatgacgccgacgaaactggccagcacgtgctgtatcgcggcaaaggtggcggggagagggcctggacgatcctcgagttgatagatcaggtcctggttgggagcgtcaccgctcctggattccgttgcggtcatggttcaagcctgccattcgttattgttcggtcatgggctttcgaggctgcacggacctcgcatcctgatcgtcgaaaagctgttcgatcggtcaggttgggctcgactataacaatctgtggacaggagttgaaacaataaatttatcgattgtgcacaattgcgacgaccgcgccgtgcgccatgcaaaccaggcgtggtgcgacctagcggttggccagcagctcgcgcgagacgttttcggcgaggcctgctccggcctcgctcatggtcaggtaggtgcgatcggcgccggcttcttcgatctgctgggcgatgtcctcgtacatggcgtgcgagacgatcaacccctcgaagcctttaccgcgcagcttgcgggtcgatatgaccttcgcttcggcgtcattcatcgccaggatcaccgcctcgaccttgttcatttccaggctctcccagaacatctggtcctcggcgtcggcgaacagtacctggcggcccttctcgctgcttttttccaccgttacggggtccgagtcgaggctgaccagtcgccaaccctgtttgctcagatggtcataggcggcgcggccggtgcgccccatgcccatgatcaggatctgtgcgtcgcccagcgacacgggttgctcgtcgggatggcgcgtgttgcgctccagcggaatcagccgtttggccagccgatcgtagaggggatgggagatgcggttgagctgcgccgaaaagacgaacgacagggccacggtgattgccagcggcgtcagccactgcgggagcaccacgctggcgacgatcaggccgaactcgctgtagttggtcaggctcgcggcgctgagaaaggcgctgcgcgcacgcaggcgaaacagcaggaagaggaagaagaacagggcgcccttgagtggcagcagcaacgcgatagccccggcgaacagcatcgcatgggcatcaggcaggccgccgatgccgatctgcaagaaaaaaccgaccaggaagatttccttgatcgcccacagtgagttggacagctcgatcgcgcgcttatgcttggccagcatggcgccgaaggccagcgcgcccagttccgaactcagcccgacatactcgaagccgagcccgcccaccaccagcgccagggtcaggcccagcagaaccatcagctcctcgtggccgctgtggtcgagcaggcggaacagcagtggtcgcaacagcggcaggccgaacaccagcaatgcccaggccgatggtaccttgccgctggcgatgctcatcaccaccagggcgataaggtcttgaatgatcagcacgccgatggcgacccgcccatggaaggcacgcagctcgcgcttgccctcgagcaccttggccgccagcacggtgctggagaaggacagggcgatcgccagcagcaaactctcgcgccaactcaggtccagcgcgaactggattaccggcaggaccagcaggctggacacggcgaaatgcagcaagccaccaccgatgacctcgcggcgcagcagattgctcggcttgagcttcaggccgacggtgaacagcaacagcagcacgccgagatgggcgaggtgcgcgaggatctcgctgtcccgcgggccgacgccgaaatgctcgccgaaaccggccagggtgaagcccgcacccagatagccgatcagcggcggcaggcccactgagcgcgcggcgagcccaaggacgaaggcgaacgcaatccagctggcttcaatcatctcgaggtgctcgggggcgggcgggcctgcattttagccacggcggacggcttgtcgaggttcccctgggtttgaagcgacgaaacccgcgcttggcgggtttcgctgcgggtagcgccgggcggggagcgcggcgagtgtcagcggctcagtgctgcgccgcgccggtcagcgcctggcgttcgacgccgccgagtacgttgaatagcaggttcagcgtcaccgcgctgagcgtcgccagggcgataccgctgtgcgtaatcggctccatccattgcggcagctgagcgaagaactcgggacgcaccaccgggaccatccccaggcctatgcttacggccactaacaactggttgcgacgatcgccgatatcggcctcctgcaggagcttgatgccggtcgccgcgaccatgccgaacatggcgatgctggcgccgcccagcaccgctgcgggaatcgaggcgaccagaaaggcggccttaggcagcaggctcaggctgatcagcaacaggccggcgaccgctgtgacgtagcggctgcgcacaccggtcatctgcaccaggccgatattctgggcgaacgaggaatgggtgaaggtattcatgaaaccggcgaaaaaggtcgcgccggcatcgcacaacaggccgcggcgcagctgcttggggtcgacctcgtgtccggtgatcttgcccagcgccaggaacatccccgccgactcgacgaagatgatcaccaccaccaggcacatcgacagaatgggcgcgagcatgaattgcggcgcgccgaagtgattcggcgtcaccacctgcagtgcgggagcgctgtcgattccagacagatcgaccatgcccaggctaccggccagcacgtaacccagggccatgccgatcaagaccgagacgttcacccagaagccgcgcatgaactggttgatcagcaggatcaccgtcagtacggcggcggcgacgccgaggtagggcagtgcgccgaactggccgccgctgccgccgcccgcccagttcacggcgaccggaaacagcgaaagaccgatggcggtgatcacggtgcccgttaccagcggaggaaacaggcggacgatcttgcagacgaagggcgcgaacagcaggccgaagaagccagcggcgatggtcgcaccgaagatgccgggcataccgacgccgggcatgccggccatcaccaccatgctgctcacggcggcgaagctggcacccatcatgaccggcatgcggatgcccaccgggccgatacccatcgactgcaccacggtggcgatgcccgccaccagcaggtcggcgttgatcaggaaggcgatctcctcgcgtgacagcccggccgcctggcctacgatcagcggtacggccaccgctccgccgtacatcagcagcacgtgctggaagctcaccagcagcatctgcagcaggggtagccgctgttccgtagctggtgcggtttcccgctcggtcacatcgttcatgcaaaacacctcggacgctgttgttattggatggcgcgcgggccccgctgcacgtgcggggccgaatagggttcgggcgctgaatgctcaggcccgatgggatcgatctttaggtgatacggagctcgctcggctagtgcaggaatagtggggatgaaaaaaagccgcgctcggaagcgcggccctgggcacggcgatcagttgatcggagcacccttgtcgatccaggcaccgagcaggtcgcgctcttcctgggtcatatgggtcatgttgcccagcggcatgatctggctcgctaccgcttgcgcatggatcttcgcggcctgctggcggatctgctcgggtgtatcgaacatcaccccggcaggcgccgcactgaacatcgggctgctcggctgcgcggagtggcacacggcacagcgctccttgatgatccgatgaacttcggcgaactggctattaccggcttgctcggcgggcgcggcggcggcctgttgggcctcgatgctctgctcgcgagggctggtaggcacggcgttgggtacaccaccctggcggctgggcgcggtgacgaatgccaggcagatcatgccgacggcagcggctggcagggcccaggcgaagcggttgctgtcatgacgggtgttgaagtagtgacgaaccagtacggcgagtaccgagatgccggccaggatcagccagttgtattggctgccgtaggtgctcgggaagtggttgctgatcatgatgaacagcaccggcagggtgaagtagttgttgtggcgcgaacgcaacaaacccttggccggcagcaccggatccggcgtgcggttctgctcgatggcggcaaccagcgcgcgctgggccggcatgatgatgcggaacacgttgccgaccatgatggtgccgatcaacgcgcctgtgtggatgtaggccgcgcgcccgctgaacacctgcgagtaggcccaggcggcgaagatcaccaggacgaacagcaccagaccgagcagcgccggttgcttgcccagcggcgaatcgcagagcaggtcatagacgaaccagccgacgatcagcgagccgaaaccgatggcgatcgccatggccggggccatgtcgctgccgggcgcgatcaggtacagcgaagggttgaggtagtagaccaccatcagcagggtcacgcccgacagccaggtggtgtaggcctcccacttgaaccagtggaggttgtccggcatctgcggcggggccagcttgtacttttccaggtggtagataccgccaccatggatcgcccagaggtcgcccgagaggccgtcgcgggggttggcgcggttaaggttgttttccagccagacgaagtagaacgaggcaccgatccaggcgatgccgacgatcatatgaatccagcgaatactcaggttcaaccattcggtcagatgtgcttccacgataattacctcttgcacggccggcgtaccaaccgttgtttcttcttattcgactcgtcgcaagtgtcccgcttgctctgaagcacgcatttccggcgctggctgtgcacgtcagccgtgccggggatggccctcggtgatcaatcgaacacttactcggagtcccggtgggggtcgaggagtaccagctcatcctcggtgaaaaaatgctcgtcgcagttgttgccagaaccgctgcgatcgaccaccaggaattcatcccgcttttcgatcgtcagcaccgggtggtgccagacgccgcggtggtaattgacgccctgcctgccgttgctgcggaaggcgcggacgtgttccggtacaggtgcatcgccaagtggcgcgaccacgaccagaaaggggttgccgagcagcggaatgaaagcctggctgccctgcggatgacgttcgagcatgcggatgaccagcggcaattccagcgcgtcggcggcgaagatgctgatgatggcctgatcgtccggctgcgcggtctccaccgtcgccagcttgtggtagcggcgggtagacccgttgttgatcatgaaatagtcactgccttcggtttcgatgacatcgccgaagggggcgaaggcttccttggtcaacggttcgatcttgagtgtgcgcatgctgtgctcgttcagttgttttcgttgttcgcttagcgccgttgcccctcaccctaaccctctccccggaggggcgaggggactggcgcggagccgcggttgacctcgttccttgcgctccccctcggctgatgccgatgcagagccgaggagctttcttttttgtgggagcggtctcgaccgcgaagggcctcgaaagcgtttgcggtcgagaccaggcgtccccaaccgctcccacagtgtgtatctggtcggctccggctggcctcatttcacggccttgccgaacaaccgccttacggttccagcgatgccccaccctacggccggggcgcgctctattgtgggagcggtctcgaccacgaagggcctcgaaagcgtttgcggtcgagaccaggcgtccccaaccgctcccacagtgtgtatctggtcggctccggctggcctcatctcacggccttgccgaacaagcgccttacggttccagcgatgccccaccctacggccgggacgcgctcttttgtgggagcggtctcgaccacgaagggcctcgaaagcgtttgcggtcgagaccaggcgtccccaaccgctcccacagtgtgtatctggtcggctccggctggcctcatctcacggccttgccgaacaagcgccttacggttccagcgatgccccaccctacggccggggcgcgctcttttgtgggagcggtcttgaccgcgaagggcctcgaaagcattcgagaccgctcccatgacggttcggttacttcactgccttgccgaacagccgcagacggctgacgccgccgtccgggaagatgttcaggcgcacgtgggtgatcgggcctagcttggcgatctgttcgctgaactcgtgctcggcgtgcatctgcagcttctggcttggtagcagctcgcgccagaacaggctttgggtctcgatctggctgtcggtgccgcctttgacgtacgccgcctggatgctgcagctgtccgggtagttgcccttgaagtgcagggtatcgacgacgatccgctcgatctcgccaggcgtgcccagcgcgacgatgacccagtcgttacccggcgtgcgccgacgtgcggtttcccagccgtcgcccatgttcacgccgcggcccgggttgaggatattgctcatgcggccgaagtgctcgtcggagcatgccagcgcgcggccaccgttgagcgccgaggccaggtcgagctgctcgttatcgccgacggtgctccagtcgcggtacgggatgccgtgtatgcgcagtcgggcaacgccgccgtcggggtagatgttgaagcgtaggtggctgaccggcttgtcgaacgcgatctcgtgatagtggtggctgtcacccttgagttcgacggccggaagcacttcggtccagaccgttgagtcgtccggatcgccctcggcgaggaagcaggcctccagcgaggcggacggcgggaagttgccggtgaagaagctggtgtcaatgtcgacacccttgatcgttcccggcacgccgaggcgaatcaccgcgtggtcgtagccttcgaaacgcttgcgacgcgattcccagccatccatccacttgccgttgtcatcgaacacgccttctttccaaacggccggcgtcggctggaacagccggttgacgtcggcgaaccagtcgtcggtgaccgaaagggcgcgggtgcccaggcgggcgtcggccaggttgacgtatttttcgaacggtgcggcgtagcgcttcatgttgttcttctctcggtgtcgtctgacgggcggttttgcctacatcgtttgcaggcggaacaacgcgatcttgttgatttccgccagggcgcgtgcgaattcctgctcgggcgtgttgtgcatgcgttcttcgaaggcggcgaggatctggtgccgattgctacccttgaccgccatgatgaagatgaagccgaacttgtccttgtaggcctggttcagctcggtgaagcgggcgaattcttccgcggtgcattcgtgaatgccggcgccggcctgttcggcggtgctcgatgccgtcagctcgccgcgtacggccgccttgccagcgaggtccgggtgagcgttgatcagcgccagttgggtgtcgtgcggagccgagagcatggcctgcgacatgcgctcgtgcatcacctcgacgtagtccaacgactcgtccacacctgcctggtaaacggtatcggcgacccacggcgaatgctcgtagacatcggcgaacgtggcgatgaaggcgtcgcggtccagggtggacggcttgatggtcttgaacggggtcattagctgcgttcctgggtcagagggtgggtcgagtgccagtggcgggcgatgtcgacgcggcgggcgaaccacacctgctcgtgacccttgacgtactcgatgaagcgctgcagcgccgccagacgcgccgggcgacccagcaggcggcagtgcatcccgatggacagcattttcggcgctccctcgcagccttcggcatagagcacgtcgaaggcgtccttgaggtaggtatagaagtcgtcgcccgtgttgaagccctgcacctgagtgaagcgcatgtcgttggtgtccagggtataggggatcaccaggtgcggcttgtccggggtcgattccggatcccaatagggcaggtcatcgtcgtaggtgtcggaatcgtagaggaagccaccttcctcgcggaccagccggcgggtgttcggaccggtgcggccggtgtaccagcccagcggacgctcgccggtgatgtcggtgaggatgcggatggcctcgagcatgtgctcgcgctcctgctcctcgtccatgtactgatagtcgatccagcgatagccgtggctgcagatctcgtgaccgtcggccaccatcgccttgatcacgtccggatgacgctgtgcggccatggccaccgcgaagatggtcagcggtatgtcatgtttgcgaaacaacttgagcagacgccagacgccggcgcggctaccgtactcgtatagcgactccatgctcatgttgcgcacgccctgcaacggctgggctgaaaccatttcggagagaaaggcttcggattcgttgtccccgtgcagcaagcagcgctcgccgccttcttcgtagttgagcacgaaggacaatgcgatacgggcatcgctcggccattgcggatggggtgggttctcggcgtagccgatgaggtcacgggagtagtcggcgctcactgttgttattcctttgtctatcgcgggtcgcggccttggtagctgtgcgaccgtcgtgatgtaattgtatacaaaacgttttgcgctttgtaaatcgcaattcgctgatttctttcatcagtcgactcaacggtcgccttcgctgcgctccgcttgttttgcctcgagccctgtcgatccctccggcgcgagttgccgagcaaattcctggccagagctgtgctaaaaattgtgtacagtttttccttaaactgtctttaaaaatggttcgtgcgtgctatgctcgaacccggtccacaccaatcacaagaggaggcggacatcggcagccaagctgcggtgtcggaatctatgggacgtttgactactcatgtactggatgctgcccacggttgcccgggcagtgacatccgcatcgaactctaccgggtcgagggcgaacgcctcgaactgatcaccacccggcaaaccaatgccgatggccgttgtgattcgcctttgcttgagggcgacacctgccgctccggtgtctaccagctgcaattctcggccggcgactactaccgcggccgtggcgtcgcgctgcccgaaccggctttcctggacgtcgtggtgctgcgcttcggcatcagcgccgagcaggatcactaccacgtgcccttgttgatttcgccgtatagctactcgacctatcggggtagctgacggcgcctgccgtgtgcagcgacacggcagagacctctcccatgcgtgaaccttggctcccctgagtcccccgacccgcctttgatggcgggttttttttgatttggtgatgaggctctagctaggggagggcgagtttcgctcgcggagctgtttggcttttagatgctgtgatctaacccttttgtcgtgatgggctgaggctttggtttcgccctgctgggcgagtcagtttcccggatgctggacggctggctccgaaaaagtaggcagagcggtatgcccctgcacattgcgctgttgtgggagcggccttggccgcgaagcttttctgcgcttgagtcatgtggtttacgcctgttggcagggttggccgatgcattggtgttgcccagcaggtcgaaaccaatgcctcagtcactcaatcatcgagcgtagccacgcggcctccaatagctccgcggccaaggcccttcaccgactcatcaacgaaaccgccccggcccctccgaacagggccgcactggtgcggttgaaccacacttgcccgcggcccgttcgcaggtagcgcgccgccccatgcgcccccagcccgtaggccagcttgcagcacaggtccagcaccgcccaggtcagaatcatcaccagcaattgcggcaggaacggccgatccgcactgagaaactgcggcaggaaggctgcgaaaaacagaatgtctttcgggttgctcgcgcccaggccgaacgcgcgccagaacaattggcgaaagcgcgggctgacctcggcagtcgtcacgctgggcccgctggagggttggcgtgatgcctgccagctctgccaggcgagatagaacaggtagaaggcgccgatgatcttcaaaacgccgaatacctgttccgacgccagcagcagggcgccgagccccagcgccgatgcgctgagcagacagatcgaggcgctgaccccgccgacgaatgccggccaggagcgccgcagcccatagttgaggctgttgctgatcatcagcagcgacagcgggccggggatcagaatgaccaccaacgctgcgctcgagaacagcaaccaggtttccaggctcatttcggtgctcctttaggcaagtattcaatatcccggcgcgccgccgatgggcgccatcctgatcatatgctggctgcggcgtgcccggcagctttgggtcaggtcatgacgcagaaaagccccatcgtcgaaacgatggggctttgcgcctcgcctgctttagaggaaggcgaacttggcgatgaagacgatgcacaggacataaaggctaagcgagaccttgtcgcgttgcccggtcagcagcttgagcgttgcgtaggtcagaaagcccatcgcgataccgttggcgatggaaaatgtcagcggcatcatcaccacggtcacgattgccgggatggtgtcggtgtggtccttccagtcgatgtgggccaggccgctcatcatcagcatggcgacgtagatcagcgcacccgctgtggcataggcggggatcatgccggccagcggggcgaagaacatcgcgatcaggaacaacgccccgacggtcacggcggtaagtccggtgcgtccgcctgcggcaacgcctgaagcactttccacgtagctggtgaccggcgggcagccgacgaaggcgccgacgacgctggaggtgctgtcggctttcagcgcgcgggagaggttttggatcttgccgtcctcgtccaccaggttcgcacggtgcgcgacgcccatcagcgtgccggcggtatcgaacatgttcacgaagaggaacgccagaatcacgctgaccatcgccaggttcagcgcaccggctatatccatcgccagccaggtcggcgccagactcggcggcatggagatcaggccgttgtactcgaccaggcccatggcccagccaatgccggtgaccaccagcatgctcagcaggatcgcgccgaagacgttgcgatggctgagtacggcaatcatcaggaagcacaccgcggccagcagcgtggcgggttcgccgaacgagcccatggtcagcagcgtggcggggctgtcgacaacgataccggcggttttcaggccgatcagcccgaggaacagaccgaccccggcgcccatggcaaagcgcaggctcatcgggatgctgttgagcagccattcacggatccgagacaggctcatgatcatgaacagcacgccagagatgaacaccgcacccagggcgatctgccagctataacccatctcgccgaccactgtgtaggtgaagaacgcgttgagccccatgcccggtgccaggcccactggccagttggcatacaggcccatgaggaagcagccgagcgcagcaccgatgcacgtggcgacgaacgcggcgccatggtcgacgcccgcgttggccatgatattggggttgacgaagatgatgtaggccatggtgacgaaagtcgtcaggcccgccaaaagctcggtctttatattggtgcgatgtgcgctgagtttgaagaatcggtctagcaggccgagttgcgtgggctgcagtccgagggtgggctgttcctgcttggtggtttccacaaggtgttcctcatcgttcttgttgtctatcacccagagcgacgctctcgaggggcaggtgatggttgagcgctttctgatcggtttttttgaccgggaggtcaggaaggcttgacgtgattatgcttttgtatacaagaattgcaactcgatttaagcgttttccatcggccaagcgggaattcatgctttgcagttcagccagcgtttcgaatggctctgggcacgtaaagccagcgggcgagacgccgcacaatttgattgtgcacaataaacccggatttttttcattgttttgccgttggccactgcctgccagccgctgaaaggcagtaaagttcggtttgccgacatttccgacgcgagtcaccatgaacgaacagttgcagcctctgaaaaagccgtcacgaaacggcaaggtccgcaccgggacccaggacgacatcgtttacgcccacatcttcgatgcaattctcgaacagcgactggcgccgggcaccaagctcagcgaagaggcgttgggcgagatcttcggcgtcagccgcaccatcatccgtcgcgcgctgtcacggctcgcccatgaaggtgtggtgttgctgcggcccaaccgcggcgcggtggttgccagcccgagcgtcgaagaagcacggcagatcttctttgcgcgtcggctggtcgagcgcgccattaccgaactggcggtgcaacatgccagcgccgatcagctcggcgagttgcggcagatggtgaccgacgagcaggactgcttcgcccgaggcgatcgcggcgccgggattcgtctttccggagagttccatttgaagctggccgaggcggcgaaaaatgcgcccttggtgagtttccaacgcagcctggtatcgcagacttcgctgatcatcgctcagtacgaaagcggtaaccgctcgcattgctcctttgacgagcacaacgagctgatcgacgccatcgccgcgcgcgacagcgagaaggcggtgcgcctgatgatgcaccacatggatcacatcgacagcaagctgaacctcgacgaagacagcgcatcggatgacctccacgctgtcttttcgcacttggccctgacgaagaaaaagccacgcacagctcgctaatttccgcacgtttctagaagcagcatcggctcggctcggcttgtcgcggacgcttcgagccgaccgtctgccttcgccacgccggccacctgtggctccatagccatctgctgcctgggctgccgccgcgggcagtgcctgtcgaacgtctactgatccctcagtttgctcgcgcactgtgttgtgctgcgctcgcgcggattgcgcggccgacggaggcgttcgggcggagcaggcgactgcccttcaaaaaactagctttccagcttcacccgcgacgctctgcttccactgctgccgagccggcttgtgccaagcggcatccgatagtacgcatgccgctcgaccctgttgcgcggattcatttggctacgttaatgttatgttataactaacacttgttatggattctggttgttcacaggcgccgccagcccccgctgcgaagcgaaaggcctggttcgagccggcgactactgaggtgatgatgattgtatgtgatggcttgcaatggggcgccggaggatgtgcgcttacgccgcccctcgacttgaggctcgaagccggcagcctgacggctgtcatcggcagcaacggctcgggtaagagcagcctgttgaaggtgttggccgggttggatcggccgctggcggggcgagtcgaggtgggcgttccgcttctaggcggcatttcctatctgccgcaacagcagcaggtggatcggcaatttccgatccgtctggccgagctggtcagtgccggtttctggcgtagccgcctcggacgtagcgaacggcagatgcgcttgcgtcaggcgttgatggattggggtctgctcgatttgcaaacgcaagggctgcatgccctgtccggtggcgaattacagcgcgccttgctggctcggctgagcctgacggacgcgccggtgctgttgctcgatgagcccgaggcggcgctggacgaggtgggattgcggttgctctggcagcacatcgaacgctggcagcagcagggcaggacgctgatgttggtcagccacaacctcgtcgggctgggccagaagcagtgcgacgctctgatgatcgcccgcaacggttgtatctttgcgccgatcaaccagttcatggctgaccagcaacggctcgggcaggtcgcgtgacgccggatttgttgtgggcaccgttcagcgagttcgccttcatgcgtcgcgccctgttcggtggcgtggcgttggcctgcagtgccgggccgctgggtgtgtttctgatcctgcggcggatgagcctgatcggtgatgcgatcgcccacggcatcctgcccggtgcggcgctggcgttctggctgttcggtttgagcctgccggcgttgtcgctcggtggcctggtggccgggctcgggatggctggcgctgcggcctgggtcagccggcgaaccggcttgcgtgaggatgccagtctggccgcgctctatcccatatcgcttgccagcggcgtgctgttgcttggtttggcggggcgcaagctcgacctgctgcacctgctgttcggatcggcgctagcggtcgatacggcgacgctgtacggcatgctcggcactgccgtgttcagtcttgtggtgcttgcgctcagctatcgcgccctggcgctggacagtctcgatccgctgttcctgcgcagcatcagccgcttcgggcccttggcgcacgcggccttcctgacgctggtggtgctcaacctggtgatcggctttcaggccctcggcgcgctgatggtggtcgggctgatgatgctccctgccgctgcggcgcgtttctggagccggcggctcatcgttctcctgccgcttgcagccctgttcggcgcggtctgcgtgtggctgggactgctgctgtcgttctacgtcagcctgcccagcgggccgtgcatcgtgctgctggcgggggtgttctatgtgatttcagtcgtagcggggccggtccaaggcctgctgcgctcgaccgttttacctatgaccgtttgaggtgttcatcatgcgttacctgcttttcgcgctggccctgtggctgcctttttctctgcatgctgctgagcggctcaaggtggtcaccagcttcagcatcctcgaagacctgacccgtgaagtcggtggcgaccgcatcgagctgaccaacttggtcgatgctgacgccgacgctcacgtctacgagcccagcccggacgatgccaaggccctgttgcgtgcggatctgatcgtcgccaacggcctaggtttcgagccctggcttgagcgcctgctggccagcagcgagcccgccggtaagcgcatcgatgccagcgctggcatcgttccgttgatgctggaggagggcggtgagcgggtaccggatccgcacgcctggcagagcctgaacaatgccgagatctacgtgcgcaacatcaccaaggcgctcgtgcagctcgaccccgatcaccgtgaagcgtatgaagcgcgtcgcgacgactacctggcccgcctgcatgcgttgctcgagggagccaatgcccgcatcgctacgttgccggccagccagcgcaaagtggtgaccagccatgacgccttcggctatttggggcaggcctggcagctggagttcatcgcgccgcagggcctttccacccatgacgaaccctcggctgctgaagtggcggcattgattcgccagctacggagcgaaggcgtgcgggcagtgttcgtcgagaacatccgcgaccctcggctgatcgagcagatcgccgatgaagccggcgccaccgttggcgggactttgtattcggacgcactggccagcaagggaccggccagtacctaccttgggatgttcgagcacaatctcgacacgctgatggcagcgctgaagccgtagggtggatcacgcttc

SEQ ID NO: 28 - DNA, 27989 bp, Pseudomonas sp.
atgcgcctcgagtgcctcgaagtcctcaagcgcctcgggctcctcaagttcctcaagcttctcgagtacctcgactgggcggagcaagaatcggaacggattaaattggagagcactgatcgcatcgacgatttcttgcctgtctgggtaaggggcaattacctctgtatcgaatcgctcgttcatctcagattgtgtgtggggcatttgagaagtcaaagcaacgctcgaaaatgagctgacacgatgcttgatctcatcagcgaactcacttattccgccagtgcaagaacgcttgatttcgtcacctccagcttttgtggcgacatcatcgagaagagcttgtgaaacagtaaattgaacaggctgagatttataaggtggcctacaggcactgagattgacctcggtaggcaggcaacgatggtgggcagccagctcaacaatccccgatgcatagtccctcagcatgatcgatagcggaacgcactgctcagagaaaaccatccggtaagctaccggggcgtaatgctccaaccgcattggagatggatcgatacaacatgcgccataactagccccgtgcaaccgttccattacgtagagatcatcaaggccagcgaacctctcgcacagttcaccgtagagctcgaccttcgaaagcagcaatgcggatagcgccttggtcgctttgtctctgatttctctatgcgatgccgccgtcagccacgtgaccgcaagcccgcaaagaagctgtacgtgccgatccgttttctcggtctgactggtcaaacaccagtccaggaggcggcggatcgtgctgccatccgccatatcgaagtcgttaattttcactgtccagaaagcatcacgctctggcatcgttttaataatcagaatgtcgtggagtagttcagcgttccaaggatgatcaacgttggcacagagttcgatcagcacgtagagctggctatcatcgacatccaagatagcctggtaaatttgccaagtgcgctccgtgaaagcattcgaaccacgccaacgcaagctctccagaaaggcgcctctgaccgagtcctcgttgatccagatatcgatatctctcggaagcacatccaaaagctctgagtcgaaacgctcaggaatttggatagacaaggcttcagccagaccagcccactcccatttgaatctgtcgccgtcaagaatgaagctcaaaaccccattctccagttcgcgccttggatccgtcacacccttgagcagagcgtccgccatgaggtggtcttggagtcgctggaaactgaacctcacgatatccccgaccggagtaaatggatcaatttcaagctggcgcggtggtgggtcgagtcggaaaattccgttcttctgcaggacgtcaaaccaggttttggaaggtggcgaaggaaaactcgaaaatgcttccgttgaaattcgcacagcatcggccaaaagcaaataatcacgcctgtctgtggccatcaacctggcgatggctgagattgccgctgttgtaggagcgaccagatcttcgctgccgtctctttcgacacctagattccgcgcgacactacggatgtaaaatgcaaaaacctgcttcgtgccatgcaggcctctggggaattgcttacaaccgtctcgggcaagtgcaacgcacgcgctgcgaagaaacagcggattcacaaactcagctgaaagccaaggcgtatccggctgggaaatgcctctcttgtgcaggtagaccttcgcggccctcgactgctctacattcgtcacgaagccacgaatggtgaaggcaactgtcgtctccatcactttaggtggtactacatacggcgtgtactcagtacgacaggtgacgacaagaacgaggttctcgtaagcgttgactcgggcaatcagagcgggaagttcattcctccatagttgcgcaccggcaccttcgttgatggcatcgatcagaatgagtccacgcttttgagcggcctcagctgcagaactcatggcctgcaagaatacctctggctcaactgtccccagcccgagtgtttctgccgcttgcctccaaaaaccctgagagcctaattgctgccccaaaatcaaaaccaccgggtgcccatctgaaatcgctttttgagcaacggtaccgagtgtgtgcgacttgcctgtaccagccttccctgtcagaagggcaaaacggctttgctcagcggaatagaatttcccctccagctttgaactcaagccgtagagagcatttgaaagctcgtccagcttatggctcaggtaattcatatccgaagaggagtaatcccttctggattcagatttttgaatattttgccaagcccagctcttcagttggtgaacgctattagaggcgtctgacaaggcagcgacgcaatcgacaatcggccaaggcccccaagagtcagagcaaaatctgctgccgaatgctgaagccttggatgtctcctgctcgacacgctggataccagcgatgagcctggcgtcggagtcatcctttacgaagttggtaagcttggctgcctttgctacagcggaaaaagcagatgtgagttcggttgtgacttcttcatcccgaaggagcactttgaagaggctctcgattccaacctctacgtgatcttccgggtgatatcgctcatcgagtgactctacggcgagctccacattcttgcgaaaccattgcccagacatctccagctcaccaaaccagaactttcgtagaccctcagcggtagggagtaacaatttctcggtcagatcagacgccgtccaggccacgaactcaaccgtaggaatgccgctctgggcacaaagcgcttcccaaacaagcttgtgcgtatcccagtgctcccatcctttcttccctgcgccttgcgccccgctgcgatctgtaaggttgcagggaatggcaatcacgtactgtttcagggcagggtgggatttcaaagcctgctttaccgactcgtcgattttgctccaatcgacatcccgtgatctgaggtaatacttggcttggtagccgacctcagaaccgtcctgaagaacccaatagctctcaatccctccgtcgcctcccgagccttcgatccgcctgaactctttggcgtactcggggcggtcgcgcctggcaagttggcaaacgagctcctcgaaagacaatctttgcccatcgtccttcccgatgatttttgaatagtccattgagtttccatctgaaagccggatttttcatcgacagggcaccgttcccattagggccaggtgctcagcggcgagtatgcgctggaaagatttgacgataaatggaagatgaatagcctctagtttcgtagacaccactgaacggcggcttctggccgcttttgggtcttagcggtctaccagatactcgcgacggaaagttgcaacccatgatcggccacggtgtgcaatgcatgtcgatcggctttctcgtcgatgaggagtcgccggtcatctggcgaggtccgatgatcacccaggcattgacccgcctgctgcaggaaacccactgggagaatctcgactacctcatcgtcgacctgccgccgggcaccggcgacatccatctgaccctggcgcagcggatgtcggtatccgccgcgctgattgttactacgccgcaggacttggcgctgttggatgctcgcaaggggctgcgcatgttcgagaaagtcaacgtgccggtgctcgggatcatcgagaacatgagcctgcatgtctgcagcgagtgcggtcatgaagagcacatcttcggcagcggtggggcacaacgcatggccgaccagtacggtagcgagctacttggtgaattgccgctggatatgcgtattcgcgtgggcgcagacgacggcgtgccggttgtcatcgcggaaccgacggcgactctggcacggacgtaccagacgatcgctcggcgggcggcagcacggttgtcgctacgagcgcagcatgcggcatctaccgtattgccagcagtgattgaagcctgacgaacagtttcaaaatggtatcgctggaccgttccgaagcaacggcgttaatgccaccgcaccgcaccgcaccgcaccgcaccgcgctgcagcgagcagctgtcggattgaaaacatggcgcacaagtcttcggatggatcagctcagccgaagatcgcctcgaggtccgcctccgagtcctcgggaagcgaaagatccagcgtagcctcaacgtgattaagatggctgagcatcaatgcaatagctctatcgggattaccctcttccatcgctgcaatgatgtcggagtgctcatggttgggacaggccggaacgttgggtgagtcgtagagcaaaattatcaagcatgtcagggacgccagttcacgcattagcctgatcaatggcggactaccaaccatttgggcgatcagcgtatgaaattccccggataagcgaattactgcccgcttgtcgccatcctcacgggcggcccgttccagggccacatggtcatacagacgtttgaatgcaccgccgtcagccttggcaaccaacgtacgaatcagagcgggctcaagaatgcggcgcgcttcaaaaacgtgtctggcctcctcaacggaggggctagcaacgtaagccccacggttggggatggtaataactaccccctcataagcgagtcgcgccagtacttcgcgtacgcgtgtgcgattcacctcgaaaacgcgcgcaagcttttcctcaaccaatttagtacccggcattaaacggtgttccatcaccgcattaaggatgcgttcgtaaatgctatctcgcttatctgcagtaccaagaatctggcccgtgctacgagctttgcgagggcctgtcggcgagcttccttcgttaagcacgaaaaattcctcagtaataagtgccatatgctggagcagattgtcacaaaatctcaaaagctgtccacacccgcactaaaacttatcaccggttagcggtttcgcaccaagtgcatgcagcgtatcagcgctggctttcgcactctctaacgattttatagccggccaaaattgtcagaaatacccatttatcaagggcttagctaggatttcgagttggcaacattgctaagagcagtatgacacatcaatggcacagcccttgctttggattgccacaggcatttggttttttgccacaatcagaaacgacaaccaacctccattacccatggattgatgcgccaatgaaagccaacgatgtcccgcaggcgttacctgcaaggtatccccagctttttgaaggcttaatccaaaccacttgcgaagtgacctacgtaatgaaaaataaactgatgcacgtcttcaagaggccgacagctgttgcccttacgtttttttcgctcttcagcatggcgatggttccgaacgcgcttgctcaggaaagaaattcgatcctggtagtggcggggccgcgaactccagaatcgctcgaccaggaatatccgccaactgaagcgactcacgaatccaaaaggaatatttacgagcgcctgttggcctatgcaccaaaagagatggacggcgttcagaccgagaactttgacaagctcgtcggagccttggctgaaagctgggaagtctctgatgacatgaccagcatcgtctttcacctgcgtgacggggttaagagcccagcaggcaacacgatgacggctgacgatgtcatgtggtcgttcgagcgcggctggaacaagaacgccaacttccgctggtatatgggccagatcctcggcatccagaattacaacgacgcgttcgaaaagatcgacgacatgacggttaaggtcacggtgcctaaaacctcgccgctgatcgaacggatctgggtcaacaatgacctgggtattctggacgctgaagctgtcaagcaacatgtcactgaggatgacccctgggcttccagctggctgtcgacccactctgcttcgttcgccccctatcaagtgaccaagtttcgttccggacaagaggtcgtttatgaggccaacccgaactactaccgcggagcaccacgcctcgaaaaagtcatcttccgcgagatgccgacctctgcgaatcgcctggccgcgcttcaagctggagcggtcgacgtagcggaatggctttctccccgagagctcaccatgctggaaaagaacccccagttaaagatctggcaggtgttcggcaactacatccagcgtgtggagatgaacaatacgacgccgcctttcgacaaccccaaggtacgacaggcgctgaactatctggtaccgcgcgaagacatcctgaaggccgtctattacggtaaggcacgccagaccaaaagccctatctcggagatctacccgtcctataccgacgagtactttaaatacgaacaggacgtcgaaaaggctaagcaattactgaaagaagcaggacaggaatcaggctttaaaacccaacttggttaccgcacaggcgatcagatcgaggaagaaatagccgtcattctgaaaactgccttcgcccgcgcaaacgtcgacctggagctcgtgaagttaccggcttccacgctcgtcgagaagtactccacgggaaccatccccatgtacttctatcgtgacatggccattgttccggatgccgcgtacgtcgcaaacctctggttaaacagcgtctctcttatcaactacccgaagttcaagagcgaggaagtcgatcagctcatcaacgaggcattgtccagtaccgatgaagcgaagcgtgatgccggcatgaagcgggttcagcaaatagtcatggatcaagcgccctggatattcctgatgaaccctggttatcaactcgcaacccgagccaacgtggccggcttcagctggtacacaccaaacagcaacagctggtacgacttctacaaagaataagaaggccaaagggggcacagctgcttgtgccctcacgcttcgcgtgattacaaggacaaccctatgaaatttggcatgttgctaaggtcactaccgcgcccgctacgtatcgttctggggagaataggcatactcgttccgcagatgttcggcgttctgctcgcaacgtttctgctcatccgcctattaccgggagacccggccctgctgatgcttggcaacatggccactcccgatcagatcgaaagtctgcgagaaaaactcggactgaatgccagtgtctggacgcagttcaccagttacctgtccacggttatccaaggtgatcttggaacatccatgtttacctccaacccggtggtggtagacctgctcgatcgggttccagcgacgcttgagctgatcacttatgcaatgctcgtcaccattattatcgccgtctcgctcgcggtagtttctgtaatcaagcccaaggggctggttagcaagttcagtaaagtatatgggcttgccgcgggtgcagtgcctgacttctgggtcgggctgttgctcatttacttcctcttttatgtagccggcatcgcccctgcaccattcgggcgcctggacccaataatttcagcccctcctccggttaccggcttcctgaccatagatacgttgttagcaggcgacaccgaggcgtttgcctccgcagtgggtcggctgtttctgcctgtgcttacgttggccaccgtcaacgcaggcgcattgatgaaaatgacgcagatggtctttgcagacagctatcgcagcgaatacatccggcacgcacgtgcaagtggattatccgagtggaagctggttcgtattgcattgcgcaatagcctgccgccgatcattacgatggtcgggttcctcttcggcttcctgctaggcgccgctgtacttgtagaaacgatcttcgcctggggcggccttgggcagtatgccgtctccgctgtaatgaacagtgactatccagcattgcaaggattcgtcctggtagcggccgcattcatccttattgtttacacggtcgtggatgtcctctacggcatcgccgacccgaggattgaagtatgaaaatatttcctggatcacgcagagcaacggccaaggcaaccctggcgatcggattgatactgctcgctttgcagttcttggcaattgtgttcgctccctggatcgcgccgtattcgcctgtagatgcaaatccactgaacgcgcttcaagaaccatccctgaagcatttgttcggcaccgatgtgtcgggcatggatatcttttcgcgcgttgttttcgctactcgcatcaacctgctgattagcgtaacggccgttgccatcgcattcgctatcggcgtcccgattggtctcgcgatcggatactacaagggctggatcagctctttagcgatgcgcatattcgactttgtgcagtcattcccggtattcgtactgggcatggttctggtgtcggttatgggccaggaaatctggaacgttgccatcgtcctggccgttcttttcacaccggtgttcgctcggctgattcgcgcagaggttttgtcacttcgtgaccgcccctttatagcggccgcgcggtgcagtggcgcgacagaccagacgatcatgttcaaacacatcctgcccaatgcactcactcccgcgattgtacaaatctcgatcagcatcggtatggccattttgctgacagcgggtctctccttcgtcggcgccggggtacggatgccaacgcctgaatgggggctcatggtgagcaatggtgctcagcatatgattctcggaatctggtgggtcgctttgttccccggtcttgccatcgtcttctcagtactgactttcgcgctgcttggagacgctgcgaagcaaatattcgaccctcagaacaggagcatttcatgatggacgccacggaactgctgctggacgtacgcaatctctccgtccgctttgataaccctgcaaagccgccggcattgagtgatgtgagcttcactctaggcaaaggcgagatcctgggcattgtgggcgaaacgggcgcagggaagtctctgctggccagagccattatcgatatgctccccgcggaagcgcgcatcaccgagggcgaagtcctggtgaatggccaatcaatctccaggatgactgatgagcagaaaagagggtttcgcgggggtgaagtcgcgctcatcggcacaaatgccaaggcccttctagacccggtagtaacggttggcgagcagatcgccagagtcctgcgcgcacaccgaggcatcggtaaagccgaagcctggaacgagtcgatccgtctgttcgagcaggtggggattgttaatcccgaaagaagagcccatgcctacccacacgaactctcgggtggcatggcacagcgcgtagtcattgccatggcgctgatcgcgcagccgaaaatactgcttgccgacgatgcaacactcggcctggacgcaaccatacagctgcaagtgctggacttgctggtgcaaaaaggccgcgagctcgggctggctgtcgtattgattacgcatgatctcggcatggtcgcgagctactgcgatcgcgtagggatcatgaagtcaggccagttgcttgagctcgaaagcattcgctcattcctgaccgatggcccgaaacacccttacagccgcgagctactcgaagctgcgaaagtccggcctcttcccatgagcacaaagcatgtgcatagcgaggtggatacagcaccgttgctcgaggttacagacctcgtgaagacattccatatcaaggggacatcggaggtcgttcgtgcggtcgaccacgtgtctctttcgatccgacgtggtgagacgctggcgcttgtcggcgaaagcggatcgggcaagacgaccatggggcaatgcctggttcgcctgttgcagcccgattcgggatcaatccgattcgacggtaccgaaacgtctacctactcagacaagcagttcagggcggtacgccgtcgcatgcagatggtcttccaggaaccctacgtggccctgaacccgaggtggcgtgttcgcgatctcgtggccgagcccctgaacctcggagagcctttgacgcgctcacaaaaagcgacgcgtgtgctggaattgctggatctggtcggcatcgccagatcgaaagctgaggtttatccgcacgagctgacagccggcgaacagaagcgcgtcggcgtcgccagagcgttagcggtcaaccctgattttgtgattttcgatgagccgacaaccgctctggacatccgtgtacgagcccagatcatcgacctggtgcgcgatcttcaaaagcgcatggggctatccgcccttttcatcacacatgacctcaactctgttcgctcactggcgcattacgtcgcggtaatgcgtcacggcaaaatcgtcgagcaagggccgaccgagcagattttcgctaacccgagggaatcgtacacacgcaagctcctgagtgcggagctccccatcgaaattcggcctgacgtggacgcgcgcagcctccagaccgcggaggagctatgaaccgcgatctctcgtcgaacaaacccgtcctcgtcaccggtgcggctggccttgtagggcgccagttagtgcgccgcctatccgaccaggggcgctccgttctggcagtcgaccggttttcttcagtaactgaggagggaatcgagattcaggaatgcgacctcggtgacgtacacggactacacgccatagcccaacatggcatcgactcggtcgtgcactgcggtgcttattcgggcccaatggtcgcccgtgatgcgccctactcaatggtgcaagtgaacatcgttggcactgccaacatgcttgagcttgcgcgcattcataacgctcgaaggttcgtttactgctcctcgactagcgcctatggcgttaccaaatcgtcaccggttatggaagacagcgcgcttagaccagcgagcctctacggcgccagcaaagtcgcctcggaatatataaccactgcctatgccaatcagtacggactttccgctgcgagcattcggctctcctgggtatacggacctggccggaccactccctgtgtcatccgcaccatgatcgaggatgcgctagcaaatcgccctaccaggctgccttttggctcggacttccctcgccaatttatccatgtcgacgatgcggttgatgggctggtgagcgcactcgacgcccccaccttgccaagggcgacatacaacatcaccggcgacacccgaacgacgcttgagcaagtcgcagcgttggtgcgcgctgtgttcaaggatgctgacatcgagttgcagccgggtccggatccagtcgacgaactccaggaaaagttcagcattgaagctgcgcggcgagatcttgcatacgagcccagggttgctcttgagcaaggcatacgcgcttacgcgaactggatcacgatggctcagagtaaggaatctgatgacccaaaaaccgcaagctaaagccgggccgcagatcgaatccaatgcgcagacgttttaaagcctgagcggacgattcatctctggcacagcgggcaacctacctatcaccgacttcacatgctcgacgatgaaaactctcgtccgtgcgaagtcggccacgatctcaaccttaaacaggtatcgcgcatatgaacgattctgaaagagatttcgtcggctatggccgcaatccaccagaccccaaatggcctggcggagcacgcctcgctttgaatttcgtactcaattatgaggaagggtcggagccgtcgatacaagacggcgagagctccactgaaacctggtttaccgaaagcagcggactcaacaccggcgttcagggccgtgatctcgctgccgagggtttattcgagtacggaagtcgcgtcggcttttggagggtcatgcggcttttccaggagcgttcgatgatggcaacgatattcggctgtgcgctcgccctagagcgaaatccggatgcctgcgtagccatcagagaatcgggctttgatgtctgttcgcacggctggcgttggatcaagcattacgggttatccgaagaggaagagaaagagcatatccgccgcgctatcgactctcttgaacgaacaatcggcactcgccctcaaggctggtattgccgttactcgccgagcaccaacacacgacgtttgctcgtggaggaaggaggctttctctatgactcggattattacggagacgaattacccttctggactcaagtcggcggaaagccgcatctcgttgttccctactccctgaccaataacgacgggcagtttgccgcaggcgtcagtaccggagatcaatggttttccttcctcaaggatgccttcgacatgctctacaaagaaggccggacgcaacccaagatgatgtctgtcggccttcatctcagacttgtgggccacccagcccgagcagcagcgctcgagcgcttcctcgactatgtctcgaccttccccgacgtctggatcacgcggcgcattgatattgccaagcattggatgagcgttcatcccgcacctcacaactaaggatgcatcatgactaacgtatttgatctgacgggccgcaaggccgttgtgaccggtggtagccgaggtattggcggtgcgatagcggaactgttcctggagcacggcgcggaggttgcgatctgccatctcgatgaccacgacaatgctgaaagcttcaaagatcggctgaaaaccagggggcttgagcttcattccaccgaatgcgatgtatcggatcccgcagcggtagcggccttcgccgaatgggcgcaggagcgcatgggcagcgtggatatcgtcgtcaactcggcaggtctgggtggcggcgaccgcccgttctcgatgacagacgacagcgattgggaccgaatcgttggagtgaatctccgcggaaccatgttagtcaccaaagccttcttcggagcgatggtttcacgcaactatggccgcatcatcaacgtcgcgtctcaattggcctataaaggcgcccccggccttgcccactattgcgcggctaaagctggggtcgtgggcttcacgcgagcgctcgcctatgaaggggcgccatacaacgtgatggtgaacgccattgccccgggcccggtagacaccgaactcctgcgcaaccacagcaaggaatggcttgaggccaagaaggcgcaattgccaatcggacgcttcgggcatgtagccgaaatagccccaaccgccctcctgctggcgtctgcagcgggcgcgttctatgccggccagacactgtcaccaaatggtggcgatgtgatgctttgaatccatatcagtaaatgactggcaccgtgcggcagctcctggcggcttcatggcgcaacggcgcatgggaaaaactttgttccgcagtctgcggctcgcagtttcctggggccattgccggcgggccggtcactatttcagagacttgaatgaatacattcgacacagttatccgcaatgcccgcgtagtcaccgcggcagatatttttactagcgacattggcattcgcgacgggcgcattgcggcgctgggaattgacctgccgactggcctcaaggaaatcgacgccaaaggccgacacgtgacgccaggtggaatcgacagccatgtgcacctggaccagccgaccggagacggttcgatcatggctgacgactttctcagcggcacagtctccgcagcctgcggcggcaccactacggtgatcccgtttgcctgtcagcaaaaaggcaagagcctgcgcgccgccgtggaggactaccaccgccgcgccggtcagaagccggtgatcgactatgccttccacatgatcgttaccgacccgacgccggaaatcctgcgcgacgagttaccggcgctgatcgctgagggttatacctctttcaagatctatatgacctacgacgccctgaaactcagcgaccgcgagattctggataccctgtcggtcgcccgcagcgaaggtgcgatggtcatgttgcatgcggagaacgccgactgcatcgcctggctcaccgagcgcctgctcgccgccggccacaccgcgccgcgctaccacgcgacctcgcgaccgatgctggtagaacgtgaggcgacacaccgcgccattgccctggctgagctggtcgacgtgccaatactgatcgtccacgtttccgggcgagaagctgtcgagcagattcgctgggcgcaaagcaacggcctcaaggtgtacgccgaaacttgcccgcagtacctgtttctgaccgccgactcgatgggttgcgacgacagcttcgagggcgccaagtgtatctgcagcccgccgccgcgagacaaggccaatcaacaggtcatatgggacgggttggaaaatggttcattcgaggtgttctcctcggatcacgcacccttccgctacaatggcccggacggcaagaaagcacacggcgaacaggtgtccttcgacaaagtcgctaacggcattcccggtatcgaaacgcgcatggccctgctttggtccgaaggcgtacgcaccgggcggatcactccccagagcttcgtagcgctgacctcgaccaatgccgccaagctctatggcttgtacccgcgcaagggcagcatcgccatcggttcggacgcagacctggtgatctgggacgaagatcaaaccttccacctggacaacaatcgccttcaccacaatgtcgattacaccccctatgaaggcatgcacctcagcgcctggccagcaatgacgctatcgcgtggcgatgtcgtgtgggatggcgaacagccgtgcggcgatgcgggccgtggtcagttcctaccctgtgctcggccagacccggccaagccacgtcgccgccagacggagattccgctgtgagcgagacgctgatcaagtccgtggccgatcgactgatcgacagctggcacagcggccggcggcagcctgtgtcagggctctcgctgccggacgcgaatgctgcctatgccgtacaacggctggtcactgaaagtcttggctggttcgagggcacccgcccatgtgcttggaaactcggcggcgcgccgggcggactggtcagctgcgccgccataccgagcaactcgatccatccatcggggtggcaggtccctgcgcgttatgctgtgggactcgggatcgaaggcgaactggcgatccggctgggacgggacctgtcagatacgccggacatagttgagattcgtgctgccatcgacgcttggctgccagcaatcgagctgtgcgacacccgcctggaggaagacgccagggtcgatcctctgctgcggttagccgaccagcagctcaaccgcgcgctaattctgggtgagcctttcctgctagttgatctccccgaatggacacggcaaccggttgtgttggaggtaaatggtcacaaacagctcgcagccaccggctcgcatcccttcgtcgatccactggcctcgttgccctggctggcccgacacgctgccgagcaaaatacgcctttgcgtgccggcgacctgattgccaccggcagttggacaggcctctactgggcgagctgggggcagcgcatcgatgtcggctttggcaaattcggaaaagccactctactgacctgacgatgaagctgttacgggaggcgctcatggcaccctccgcttgtggccgaagcggtctttcacagacggctgctatcggccagaagcggtcgatcacatccgagcagggaaaagcggctattaagaatactcagccgcccatctcaacgaaatgcccaagtgattttgaacagactgaagcgattaattgcccacctcaacaaccttagcgtcgggtgcgtggtttttcaccgactcgatacccttgtcgcgtgaggcttcggaggcatatgactggctcgtcccgactacttggtgattacccgccttaaggttgaacataaacttgtcagccccgctggccttacgctcgtagcgtgcatcatcaggcgcattttttttgactgactcgactccatttagacatccagacttatccttgtagccctcgctggccagaattgcttggccattgttggctttgagccgaaaacgaaattcacccgctttgtcgttgtatatttcaaacgtcccagacatatagctattccttatttttggctttcatgagatccatcgatatcgctgcggtccaaaaaatgactgtttgcccattagaaatatggtttctgtgtgatgctagccaggcaaaatcgatgctccagcttcagtagaactgcatgacaaatgcaccataccccaagagctaaaccagattttttaacagtcaaagtatagacacagatctcaacacggctcgatttcttcgtcaagtgaagagcccagcttttgcagagatatccgagcggctgcttttggccgctagtgtgcgctctcttgcttggatggcattacgttctggcccaacgttactgtagcgaatccgcagcagtatcaatcaaagcctcctgtatcccgcgtgaagaaagacgctacgttgcgcccgttcttccacggcttcgcttgccgccccgctacggcagattcgaagtattcatcgaaatgtcatcctttagaagcagtgcggtaacaaggaatttctaccctttgcatcgcgaaccgcaattgtgcggccagcaatattgcgaaaggtgatcaaatgacgccccatccgatacaggacgccgtgctgcgggtcgaccggttgagcgtcgtctatccaggcggcgtgacagccctacgcgatacctcgattgcatttcggcgtggtgagttcaccgtgctgcttggtctctcgggcgcaggcaagtcgaccttgctccgtagtctcaatcgactcgtcacgcccactggcggcagtgtcaccagcgaactcggtgaactcggcagcggctcggccttgcgtcagcatcgtcggcgtaccgccatgatctttcagcaccaccagctaatcgaacgtcaaagcgcactggctaatgtgcttaccggtcggctggcctttcacaacacgctccgctcgctgtttcctctgccgcgtgccgatcaggagattgcgctcagttgcctcgctcgggtcggtctggcagacaaggcgctaagccgggtggacaaactgtccggtggccagcagcagcgggtaggcatcgcgcgtgcgctagcgcaacagccggcgatcattctggccgatgagccggtagccagtctcgacccggccacttcggtccgtgttctcggattgctgcgcgacatctgcaaggaagacggcatcaccgccatcgtttcgctgcatcaactcgaatatgcccgccgcttcgccgatcgcgtcgtcgggctggccgattctcagatcgttttcgatgccgcgccctcggaactcaccgatgcgcagcttgagcgcatctatgcaggccgctctacgactcagccagcgaatgctccggctgaaccacctgtcatgctcgaaccttcactggagatgtcccgatgaaacgcttatccgcgctcttattgacttgcttgctgtccgctgtttcaagtttgtccgccctagcggccgatgccgatccggatgtgctaaaggttgccctgctgccggacgaaaacgcctccgagctgatcaagcgtaaccagccgctgaaggattatctggaagagcatctggacaagaaggtgcagctgatcgtaaccaccgactattcctcgatgattgaggcgatgcgctttggccgtatcgacctggcgtatttcggtccgctgtcctacgtcatggccaaaagcaaaagcgacatcgagcccttcgctgccatggtcatcgacggcaagccgacctatcgctcggtgattatcgccaatgtggcgtcaggcgtgaatgagtatgccgaccttaagggcaagaagatggcctatggtgaccgggcatcgacgtccagccatttgattcccaaaaccgtgcttcttgagacggccgatttgacgggtgggcaggactacgaacaacattttgtgggcacgcatgacgccgttgccgtcaacgtggcgaacggcaacgccgatgcgggtgggctgtcggaggtaattttcaatcacgtagccgaacgtggcctaatcgatccgagcaaggtgaaagtacttggttacagcggcgaatacccccagtacccctgggcgatgcgctcgaacctgagccccgagctgaaaaccaaggtgcgggatgtattcgtcggtatcgacgatcccgaagtgctgcgcaacttcaaggccgaggccttcgcgccaatcaccgacgccgactacgatgtgatccgcaacatgggatcgctgctcggcctcgacttcgccacgatgtgagcaccgatatgtctactcattacaacgtgcaggcgctgcctgcagagcaacgcgagcacatccttcgaggcttcggcctcggttggtggcgccagctggggcaggtggcgattgtattcggagtggtgctgttggcctgctggtacgtggggctgctcgatgccaccacgctgctgaacgggctgccctccatcgcgaccctggcaggcgaggccatgccgccagacttttcgggctatcgaagctggattcgccccttgatcgacaccttggcgatgagcatcgccggtacggccatcgcagtggtgttctcgctggtggtggccttcgttgcagcgcgcaatacggcgccgcacccccttgtgttcggtgttgcccgggtgctgctcaatgccctgcggtcggtgccggagctgatcatgggcatcatcttcgttgcagccgtagggttcggcgccttgccgggcgtgcttgccctgggtctgcattcggtcggcatggtcggcaagttcttcgccgaggccatcgagcacgtcgacgaagcgccggtggaagccgctcgggcggcgggggctacgccgatgcaagtgctgctgcacgcggttttgccacaggtgacgccgcagttcgccgacgtggcgatctaccgctgggaatacaactttcgcgcctccaccgtgatgggcatggttggcgccggcggtatcggcttcgaactcatgggctcgctgcgcatcatgcagtaccaggaggttgcagcaatcctgctggtcatcctggccatggtcacgctagtagacgccttcagtggcgtgctgcgcaaacgtttcaaataggacaaaccatgctgccgaaactcgttataactcaccgagtacacgatgagatcctgcaactgctggcgccacattgcgagctgatgaccaaccagaccgacagcacgctgacgcgcgaggaaattctgcgccgctgccgcgatgctcaggcgatgatggcgttcatgcccgatcgggtcgatgcagactttcttcaagcctgccctgagctgcgtgtagtcggctgcgcgctcaagggcttcgacaatttcgatgtggacgcctgtactgcccgcggggtctggctgaccttcgtgcctgatctgttgacggtcccgactgccgagctggcgatcggactggcggtggggctggggcggcatctgcgggcagcagatgcgttcgtccgctctggcgagttccagggctggcaaccacagttctacggcacggggctggataacgctacggtcggcatccttggcatgggcgccatcggactggccatggctgatcgcttgcagggatggggcgcgaccctgcagtaccacgaggcgaaggctctggatacacaaaccgagcaacggctcggcctgcgccaggtggcgtgcagcgaactcttcgccagctcggacttcatcctgctggcgcttcccttgaatgccgatacccagcatctggtcaacgccgagctgcttgccctcgtacggccgggcgctctgcttgtaaacccctgtcgtggttcggtagtggatgaagccgccgtgctcgcggcgcttgagcgaggccagctcggcgggtatgcggcggatgtattcgaaatggaagactgggctcgcgcggaccggccgcggctgatcgatcctgcgctgctcgcgcatccgaatacgctgttcactccgcacatagggtcggcagtgcgcgcggtgcgcctggagattgaacgttgtgcagcgcagaacatcatccaggtattggcaggtgcgcgcccaatcaacgctgcgaaccgtctgcccaaggccgagcctgccgcatgttgaatccggtctggctgaagagcctggtagcgatcgttcaaacaggcagttttcagagcgcggcgagggcgttggggctggcccagccgacggtgtcgcagcacttgcagaagcttgaagagcaggtcggcgtaacgctggtgcagcgcagtcgtagcggctgccagcctaccacacgggcgctggccttcatgccgcatgcgaccgccttgctcgacatgcacgcccgggcgctagaagccctgcatggcaatcgtgagcgcgtcggggccagctccaacatcggcacctaccttctccagccattcgtgcgcaactatctgacgaccgcaaatgagaggggcgaggtggatctgcgcatcgccgccaacccggatgtggccgaccagctactggcgggccagctcgacgccgcgatcatggaatggtggctacctcaccccgacttcgaacaccgcctctggcgggtcgagccgctggtgcttatcgtcagccccgaccatgcgctggctgaagcagggtgcatagaacgtgatcgtctggtggacctgccgatgctgggaggtgaaccgggtagcggtaccggacggcttctgaccgaatactttggcgaactgggcgtgcctcgcagcggtatgcagctaggcagcaccgaggcagtcaaacaagcagtgagggcgggactcggcgtgtcgttggtgatggcttccgcagtacaagacgaagttcgcagtggcgcgctggtagctcttcccatcctggggcttgaaaagcgtctccaactgatctggcgcaaacctcccggaaatctgcacccgccgggatttgtgcggcacttattggaggaggcagatctagctggataaggtgatggatggttgcgatccagcgcttggcttgtcagcctagggaaactctgaaaaagactttctgatttggcaaaataccgcgaccccacccaccgagtttcccgatgaagcagatgaccttcgccgacgccgagtaggctggcaagcgcaagcaaacccgcaaggagttgttcctgatcgagatggatcgggtggtgccgtggaagggcttgattgctttgatcgagccacattatccgaagggtgaaggtggccgtccggcctacccgttgatggcgatgctgcgtgtgcatctgctgcagaactggttcggctacagcgatccagcgatggaggaagcgctgtacgaaaccacgatcctgcgccagtttgccgggctgaacctggagcgcatccccgacgaaaccaccattctcaacttccgccgcttgctggagaaacacgagctggcggccggcatcctcgctgtcatcaatggctatctgggcgaccgcggcctgtcgctgcgccagggcaccatcgtcgatgcaacgctgatcaatgcgcccagttcgaccaagaacaaggacggcaagcgcgacccggaaatgcaccagaccaagaagggaaaccagtattattttggcatgaaggcccacatcggcgccgatgacgaatcgggtctggtgcacagcgtagtgggcacggcggccaatgtggcggatgtcacccaggtggacaaattgctgcatggcgacgaaaacgtggtctgcgccgatgcaggctacaccggtgtcgaaaagcggcccgagcatgaaggacgtgaagttatctggcaggtggcggcacgccgcagcacctacaaaaaactcgataagcgcagcgtgctgtacaaagccaagcgcaagattgaaaaggccaaggctcaggtgcgcgccaaggtcgagcatccgttccgggtaatcaagcgccagttcggttacaccaaggtgcgctttcgcggcttggccaaaaacacggcgcaactggtgacactgttcgctctgtcgaacctgtggatggcgcgccgacatttactgacgaatgcaggagaggtgcgcctgtaatgcgggaaatggccaccggagtggggtccgggtggcgaaaacgtaagaaatactcgtcgaattgattgttttttgatcatttggcgagtttaaaagttgcgctaggtggtatgccggggaaatacatggctacttcagaccatccctagcagtgcctcaatgacctcaatgcccggagcaattgaccaaagcgatgagtgatggcaattcctatatgttctggcgctcgcgcatcgtccactttggtcgaaatcaaactgggcgggatgtcccctaatgcggaaaaatcttatgttcactatcgaacagagagtccgttttgttggcgttacagttgccttcagactcccgctgcctagttagagatattgatatggctttcactccacagcacaaccacctactagcagccctatcagaggcgacccaagagcgcctatttaggctcatggaatcggtggtgttgccgcaggggaaaactatctatgaggctggcgaaattatcagccatgtttatttccctgttgactcaatcatttcgctgctccacgtgatgggaaacggtgatacagcagaaatatcggtaataggtaatgaagggctagctggtatttctctattcatgggagtcgaaagtacaatcagccgcgcagtcgtacagagtgctggccaggcgtatcggatgcagggaaagctgcttcaggaggagctcagccaccacggtgagctgcaaatgctgatactgcgctacgcccatacactgataatccagatttcgaatacatcattgtgctatcgctatcactccgttccccagcagctctgccgctacttgctgttatcgctggatcgtttgccggggaatcggttggctatgacccagaagcagatagccgataatctcggggttcgtcgtgagggtataactgaggctgcggggacactgcgaaggttaggtgtgatcgaatactgtcgcgggcatatcacggtgcttaatcgaaatatgctcgaacaactgagctgtgagtgctatgccaaggtcaagcaggaaactgatcgattaatgccagggtacaggcttgctttggccgaaggataagcgcctataagcttgggaaggacatgagtttttctgttttagcgtccgtttaagcaaaaagtggacgatcaccacaggctgaaaatcgaccctaaacgaccggtgacaaacactcaaactacagacgaacagctgccaaagcctcctccgaggctttggcggtaattcgatggcgctcttaaccttgcagtgcctccatcagcacttgaacgagttgcccgccttccggggtagcccagctaccggccagttccgcaatcagctggttggtcgtggtcagtgtcacgccgcctttgtccatccggcgcagagcaatgtcatcggccataacggtaggggaaccgccaccatcggcaaccacctgaacttcatagccatcgcgtaccaggctcagtgctgggtagaccgtgcacacgtcattggtgacaccggcaatgatcagctttttgcggccagtcgctttgactgcggcggcgaagttctcatcgtccatggcatttacgatacctaggcgctgaacgcgagcggcgaattcggcgggcagaatctgttccagctcactcagcagcgggccttgggcgtgttcttccatactggaggtcagcacgaccggcagtttgaggatggcggcggtcttggccagcatcagagcgttgcgtttaagctcttcatagggaatggatttaacccagcccatggtgcccacttggtggtcaatcaacagcagggcagcattgtcagcagtgaatttttcgtaagccatgatgactctccttgcatgataagaggggcgttatcgccccaggtttgggacagcttgtttcactcagcggggttccaggattccaaagtcaccgcgctggtatgcctcgatggcatcgtccagtgcctcttgggaggcaagcgccaatggcccttgccaaaacacgggttgatgcaggggacggccagaaaacacgacggctttggcgttcacttgattcgcccgcagcgtgacaacgcggtcatcacgttgcggcagattcactggcagtgcctgctcagcgagattgaaggcttggccatcgaccaacacctcaccatcaattggcatcacgaaggcgacatgcccctccggaacagggatctggacttcagcgccctcagccagggaaatgtccaacaggctcacctcggtgggtggcgacaaaggggaagcgaccccggcgaagctaccgagcggcactcggattttcgccccaggtagctgcaccaccgggacgtcctgtgcttccaggctgaaggcaaacggtgcctgcgtttgccgatccagcggcaggttgataaagacttgcagcatgtgcacggtcttgcccggctcggctggcacctcctcatgcacaacgccactccccgcagctgtccaatgcagtccgccaggctggatcaggttgcgattgcccagtgcatcgcggttatcgatgccggtctccgaatccagaaaaagataggaaaccgctgaaaagcctgcgtgtggatggggtgggaaagtaggcccgccgatccaggcatgatcgaccgcgagaaacgggtcgatgctctggtcggactgccctccgcgcagggtgaaggcgcgaaagtggctaccgtggtgcatgcgctgcaaacgtgcgacggtgctcatggctaagttcctcaggcgctttgcgcagggctgatggacgggtaatcgatgtagccctcagcacccggcgcatagaaggtgtctttgttaggcacattgagtggcgcatcgatacgaaaacgctccggcagatccgggttggccaggaaggtgctgccgaaaacagcggcatcggcgcggccttcggcgagcaaggcctgggcggattctttgttcaggccaccacccaccaggtaagcgcctttgaacagcgggcgcagcagggcgtggtaatcgacgctggcaccgaacaaggcgacgtgcaggtaggcaaggttgaactcacgcagttgctcgaccaggtaggtgtaggtttcttgtggattagcatcgacgatatcgttgaagttcatctcgggagagatcttgatcccgacgcgatcaccgccaatctccagcaccatggcgtgcaacacttcgagtacaaagcgcgctcggttcgccaccgaaccaccgtattggtcatcgcgctggttgctgccagacgagaggaactgctcgggcaagtagccggacgcggtgtgcagctccacaccatcaaacccagcctcaatggcacgacgtgcagcactccggtaactgtcgatgaccttcgcgatctcggccacgctcatggcgtgcggggtgacgaagtcttgcaatccggtggctgtccaagtctgaccggctgccttgattgcagagggtgcttgcggttgtgcaccttcgggcagcaacgacggatgagaaacgcgaccgcagtgcatcagctgcataaagatacggccatcgcgagcgtgaaccgcgtctgttacctgtttccaggccgcgacttgctcgggggtttcgataccgggagtacggacataacccttgcccaacgcatccgggaagacgccttcggaaatgatcaggccggcgctggagcgctgggcgtagtaggtctgcaccagatcgctcggtacgccggtatcgtcggcacgcgaacgggtcatcggggccatgaccatacggttggaaagtgtgtagcgacctatctggacttgcgagaaaagcgaattcatctgggtgttcctcagtggtgatgtggctatgattcactaatgcaaaggcgggataaatccggataaattgaaatgactgatccactgatggagcaatgtgcgtggggtatctgaatgacatggcgctgtttgtggaagtcgtgaaggtgcgtagttttcgcaaagcagctgaagcgctgggtatgccgaactcgaccttgtcgcgtcggatcagtggcttggagaaggcgatcggcttgcgtctgctgaaccgcaccacgcgcaggatcgagctgaccgaggctggtcagctgtactttgatcggtgcaaacgcatcgtcgatgaagcgcgtctggctcatgagcaactgggggaaatgctcgccaggcccagcggtttgctgcgggcatccctgccggtggatttcgccaacatttacctagcaccgctgattgccgagtttgctcgcctctatcccggtatcagctttgagctggatctgaccccgcgtcaggttgatctggtgagtgagccagtggatgtagtcattcgcatgggcgagccggcgaactcgaacctgatcgcccgtaagctggcaagtttgcgtcgttgcctttacgcctcgccgcgctatctcgaattgtccggtgagcccgctcacccatcggacttggcgcagcatgaatgcctgcgcatgcgcggtgctcaaagcaaccgctggatactgctaagcgatcaagagcgagaggaagttgaggttggcgggcgatttgaactcaacagcgtggggatgattcggcggatggcgacgttggatctaggtatcgcattactgcctgaagggatcgccgctcaggccctggccaatggtgaattgcgccaagtgctgccgctgtggcaagccgccccggtgtctgtgtatgcccttactgagactcggctgctaccggccaaaacacagcgctttatcgaatttctgcgcgaaaaactggcaaacatttagcgattattacggatcgataaccttcctgcaggcagacgctaacgtctgcttttggccggttgcagccggtcagacgtctagctcggtctgttacatcagcgtaggttctgaaccctttcgagatgaaacgcatggtaaagatagccggtgcaggcagcagatctacgatctgccttccaccgcgcggaaggtcagcttgcgaagtatttattcctttacctcaccacccgaggtgcgtagtgatcgcttagtgcggcctcgtaccgccctaagcaaatttcgcaaatttatttaggtaaattactcagaacccagacgttgagagcttgccgcagttcttcattcatatttgagtatgcctgctgcagcatagctattagtctttctttatcagacattttgggtagccaatcatcaatgcatagatgatccacattacgcccaatgcggattgcagcgataactaggtccgctacagctcgtgtgtggtttgcagagtatgccgcatcgcctacgaattctatatccaagctctttaacagcttagagcattcgaacacaccgacatcacctagaaaggctgtcgtatctatttcgcaacccaagccacatatgaagccagttgaacgtctagacctctgtacaaagaaagtttgtaggaagtgccagtccccagttcctgcggcagacggaaggtttagagcggcaatcccactgagatacctgttccgcgtggtttgagggataacaatgctagacataagatcgaatccatcactagcgtcatgttctgatcaatgaagccttgcgcagcataagactatgattggtatacgcctcactgcatccggcgagag

SEQ ID NO: 29 - DNA, 9096 bp, Pseudomonas sp.
gggcaacgtggcggccagtctcaagcacgcctaccgcgagcgcgagacgcccaacgctgacgccagcaggacgccagagaacgagcactgggcggccagcagcaccgatgaagcgatgggccgactgcgcgagttgctgccagagaagcggcgcaaggacgctgtgttggcggtcgagtacgtcatgacggccagcccggaatggtggaagtcggccagccaagaacagcaggcggcgttcttcgagaaggcgcacaagtggctggcggacaagtacggggcggatcgcatcgtgacggccagcatccaccgtgacgaaaccagcccgcacatgaccgcgttcgtggtgccgctgacgcaggacggcaggctgtcggccaaggagttcatcggcaacaaagcgcagatgacccgcgaccagaccacgtttgcggccgctgtggccgatctagggctgcaacggggcatcgagggcagcaaggcacgtcacacgcgcattcaggcgttctacgaggccctggagcggccaccagtgggccacgtcaccatcagcccgcaagcggtcgagccacgcgcctatgcaccgcagggattggccgaaaagctgggaatctcaaagcgcgttgagacgccggaagccgtggccgaccggctgacaaaagcggttcggcaggggtatgagcctgccctacaggccgccgcaggagcgcgtgagatgcgcaagaaggccgatcaagcccaagagacggcccgagaccttcgggagcgcctgaagcccgttctggacgccctggggccgttgaatcgggatatgcaggccaaggccgccgcgatcatcaaggccgtgggcgaaaagctgctgacggaacagcgggaagtccagcgccagaaacaggcccagcgccagcaggaacgcgggcgcgcacatttccccgaaaagtgccacctgggatgaatgtcagctactgggctatctggacaagggaaaacgcaagcgcaaagagaaagcaggtagcttgcagtgggcttacatggcgatagctagactgggcggttttatggacagcaagcgaaccggaattgccagctggggcgccctctggtaaggttgggaagccctgcaaagtaaactggatggctttcttgccgccaaggatctgatggcgcaggggatcaagatctgatcaagagacaggatgaggatcgtttcgcatgattgaacaagatggattgcacgcaggttctccggccgcttgggtggagaggctattcggctatgactgggcacaacagacaatcggctgctctgatgccgccgtgttccggctgtcagcgcaggggcgcccggttctttttgtcaagaccgacctgtccggtgccctgaatgaactgcaggacgaggcagcgcggctatcgtggctggccacgacgggcgttccttgcgcagctgtgctcgacgttgtcactgaagcgggaagggactggctgctattgggcgaagtgccggggcaggatctcctgtcatctcaccttgctcctgccgagaaagtatccatcatggctgatgcaatgcggcggctgcatacgcttgatccggctacctgcccattcgaccaccaagcgaaacatcgcatcgagcgagcacgtactcggatggaagccggtcttgtcgatcaggatgatctggacgaagagcatcaggggctcgcgccagccgaactgttcgccaggctcaaggcgcgcatgcccgacggcgaggatctcgtcgtgacccatggcgatgcctgcttgccgaatatcatggtggaaaatggccgcttttctggattcatcgactgtggccggctgggtgtggcggaccgctatcaggacatagcgttggctacccgtgatattgctgaagagcttggcggcgaatgggctgaccgcttcctcgtgctttacggtatcgccgctcccgattcgcagcgcatcgccttctatcgccttcttgacgagttcttctgagcgggactctggggttcgaaatgaccgaccaagcgacgcccaacctgccatcacgagatttcgattccaccgccgccttctatgaaaggttgggcttcggaatcgttttccgggacgccggctggatgatcctccagcgcggggatctcatgctggagttcttcgcccacccccatgggcaaatattatacgcaaggcgacaaggtgctgatgccgctggcgattcaggttcatcatgccgtttgtgatggcttccatgtcggcagaatgcttaatgaattacaacagtttttatgcatgcgcccaatacgcaaaccgcctctccccgcgcgttggccgattcattaatgcagctggcacgacaggtttcccgactggaaagcgggcagtgagcgcaacgcaattaatgtgagttagctcactcattaggcaccccaggctttacactttatgcttccggctcgtatgttgtgtggaattgtgagcggataacaatttcacacaggaaacagctatgaccatgattacgccaagcgcgcaattaaccctcactaaagggaacaaaagctgggtaccgagcccgcctaatgagcgggcttttttttcgtcgacgctctcccttatgcgactcctgcattaggaagcagcccagtagtaggttgaggccgttgagcaccgccgccgcaaggaatggtgcatgcaaggagatggcgcccaacagtcccccggccacggggcctgccaccatacccacgccgaaacaagcgctcatgagcccgaagtggcgagcccgatcttccccatcggtgatgtcggcgatataggcgccagcaaccgcacctgtggcgccggtgatgccggccacgatgcgtccggcgtagaggatcatcctgttttggcggatgagataagattttcagcctgatacagattaaatcagaacgcagaagcggtctgataaaacagaatttgcctggcggcagtagcgcggtggtcccacctgaccccatgccgaactcagaagtgaaacgccgtagcgccgatggtagtgtggggtctccccatgcgagagtagggaactgccaggcatcaaataaaacgaaaggctcagtcgaaagactgggcctttcgttttatctgttgtttgtcggtgaacgctctcctgagtaggacaaatccgccgggagcggatttgaacgttgcgaagcaacggcccggagggtggcgggcaggacgcccgccataaactgccaggcatcaaattaagcagaaggccatcctgacggatggcctttttgcgtttctacaaactctccatggaagggcgaattgatccagatgacggtatcgataagcttgatatcaacaagtttgtacaaaaaagcaggctccccggaattgccagctggggcgccctctggtaaggttgggaagccctgcaaatgaaaactcccgaagactgcaccggcctggcggacatccgcgaggccatcgaccggatcgacctggatatcgtccaggccctcggccgccgcatggactacgtcaaggcggcgtcgcgcttcaaggccagcgaggcggcgattccggcgcccgagcgggtcgccgcgatgctccccgagcgcgcccgctgggccgaggaaaacggactcgacgcgcccttcgtcgagggactgttcgcgcagatcatccactggtacatcgccgagcagatcaagtactggcgccagacacggggtgccgcatgagccggctggcgcccctgagccagtgcctgcacgccttgcgcggcaccttcgagcgcgccatcggccaggcgcaggcgctcgatcgtccggtgctggtggcggcatcgttcgagatcgacccattggacccgctacaggtattcggtgcctgggacgaccggcaaacgccctgcctgtactgggaacagcccgagctggcgttcttcgcctggggctgcgccctggagctgcaaggccacggcgaacagcgcttcgcccggatcgaggaaaactggcaattgctctgcgccgacgccgtggtcgagggcccgctggcgccgcgcctgtgcggcggattccgcttcgatccgcgcggcccgcgcgaggaacactggcaagccttcgccgatgccagcctgatgctcgccggcatcaccgtgctgcgcgagggcgaacgctaccgggtactctgccaacacctggccaagcccggcgaagatgccctggccctggccgcctaccactgctcggcgctactgcgcctgaggcagccggccagacgccggccctcggggccgaccgctggcgcgcagggcgacgcttcggcgcaggagcgcaggcaatgggaagccaaggtgagcgacgcggtaagcagtgtccgccagggacgcttcggcaaggtcgtgctggcccgcacccaggcccggcctctcggcgacatcgagccgtggcaggtcatcgaacacctgcgtctgcaacatgccgacgcccagctgttcgcctgtcgccgcggcaacgcctgcttcctcggcgcctccccggaacgcctggtccgcattcgcgccggcgaggcactcacccatgccctggccgggaccatcgcccgcggcggcgatgcccaggaagatgcgcggctcggacaggccctgctggacagcgccaaggacaggcacgaacaccagttggtggtggaggcgatccgtacggccctggaacccttcagcgaggtgctggaaatccccgatgcgcccggcctgaaacgactggcgcgagtccagcacctgaacacgccgatccgcgcccgcctcgctgacgcaggcggcatcctgcggctgctacaagcgctgcatccgacccccgcggtgggcggctacccacgcagcgcggcgctggactacatccgccagcacgaagggatggaccgcggctggtacgccgcgccgctgggctggctcgacggcgaaggcaacggcgatttcctggtggcgctgcgctcggccctgctcacgccgggccggggctacctgttcgccggctgcggtctggtaggcgattcggaaccggcccacgagtatcgcgaaacctgccttaagctcagtgccatgcgggaagctctatccgccataggcggcctggacgaagtgcccttgcagcgcggcgtcgcctaataaggttgggaagccctgcaaatggaagttgtggaagttctgcacatgaatggtggtaacggtgatagcagctatgcgaataatagcctggttcaacaaaaagttatcctgatgaccaagccgatcaccgagcaggcgatgattgacctgtacagcagcctgtttccggaaaccctgtgcatcgcggatctgggttgcagcctgggcgcgaacaccttcctggtggttagccaactggtgaagattgttgagaaagagcgtaagaaacacggttttaagagcccggagttctattttcacttcaacgacctgccgggtaacgattttaacaccctgttccagagcctgggcgcgtttcaagaggacctgcgtaaacacatcggcgagagcttcggcccgtgcttctttagcggtgtgccgggcagcttttacacccgtctgttcccgagcaagagcctgcacttcgtgtacagcagctatagcctgatgtggctgagccaggttccgaacggtatcgagaacaacaaaggcaacatttatatggcgcgtaccagcccgctgagcgtgatcaaggcgtactacaagcaatacgaaatcgacttcagcaacttcctgaagtatcgtagcgaggaactgatgaagggtggcaaaatggttctgaccctgctgggtcgtgagagcgaagatccgaccagcaaggagtgctgctacatctgggaactgctggcgatggcgctgaacaaactggtggaggaaggcctgatcaaagaggagaaagttgacgcgtttaacattccgcaatacaccccgagcccggcggaagtgaagtatatcgttgagaaagaaggcagcttcaccattaaccgtctggaaaccagccgtgtgcactggaacgcgagcaacaacgagaagaacggtggctacaacgttagccgttgcatgcgtgcggtggcggagccgctgctggttagccactttgacaaggaactgatggatctggtgttccacaaatatgaggaaattgttagcgattgcatgagcaaggagaacaccgagtttatcaatgttattattagcctgaccaaaatcaattaacacccagctttcttgtacaaagtggttgatatctacccttacgatgttcctgattacgcatgaggatccggtgattgattgagcaagctttatgcttgtaaaccgttttgtgaaaaaatttttaaaataaaaaaggggacctctagggtccccaattaattagtaatataatctattaaaggtcattcaaaaggtcatccaccggatcaattcccctgctcgcgcaggctgggtgccaagctctcgggtaacatcaaggcccgatccttggagcccttgccctcccgcacgatgatcgtgccgtgatcgaaatccagatccttgacccgcagttgcaaaccctcactgatccgctccaattcgccctatagtgagtcgtattacgcgcgctcactggccgtcgttttacaacgtcgtgactgggaaaaccctggcgttacccaacttaatcgccttgcagcacatccccctttcgccagctggcgtaatagcgaagaggcccgcaccgatcgcccttcccaacagttgcgcagcctgaatggcgaatggaaattgtaagcgttaatattttgttaaaattcgcgttaaatttttgttaaatcagctcattttttaaccaataggccgtactgcgatgagtggcagggcggggcgtaatttttttaaggcagttattggtgcccttaaacgcctggttgctacgcctgaataagtgataataagcggatgaatggcagaaattcgaaagcaaattcgacccggtcgtcggttcagggcagggtcgttaaatagccgcttatgtctattgctggtttaccggtttattgactaccggaagcagtgtgaccgtgtgcttctcaaatgcctgaggccagtttgctcaggctctccccgtggaggtaataattgacgatatgatcatttattctgcctcccagagcctgataaaaacggtgaatccgttagcgaggtgccgccggcttccattcaggtcgaggtggcccggctccatgcaccgcgacgcaacgcggggaggcagacaaggtatagggcggcgaggcggctacagccgatagtctggaacagcgcacttacgggttgctgcgcaacccaagtgctaccggcgcggcagcgtgacccgtgtcggcggctccaacggctcgccatcgtccagaaaacacggctcatcgggcatcggcaggcgctgctgcccgcgccgttcccattcctccgtttcggtcaaggctggcaggtctggttccatgcccggaatgccgggctggctgggcggctcctcgccggggccggtcggtagttgctgctcgcccggatacagggtcgggatgcggcgcaggtcgccatgccccaacagcgattcgtcctggtcgtcgtgatcaaccaccacggcggcactgaacaccgacaggcgcaactggtcgcggggctggccccacgccacgcggtcattgaccacgtaggccgacacggtgccggggccgttgagcttcacgacggagatccagcgctcggccaccaagtccttgactgcgtattggaccgtccgcaaagaacgtccgatgagcttggaaagtgtcttctggctgaccaccacggcgttctggtggcccatctgcgccacgaggtgatgcagcagcattgccgccgtgggtttcctcgcaataagcccggcccacgcctcatgcgctttgcgttccgtttgcacccagtgaccgggcttgttcttggcttgaatgccgatttctctggactgcgtggccatgcttatctccatgcggtaggggtgccgcacggttgcggcaccatgcgcaatcagctgcaacttttcggcagcgcgacaacaattatgcgttgcgtaaaagtggcagtcaattacagattttctttaacctacgcaatgagctattgcggggggtgccgcaatgagctgttgcgtaccccccttttttaagttgttgatttttaagtctttcgcatttcgccctatatctagttctttggtgcccaaagaagggcacccctgcggggttcccccacgccttcggcgcggctccccctccggcaaaaagtggcccctccggggcttgttgatcgactgcgcggccttcggccttgcccaaggtggcgctgcccccttggaacccccgcactcgccgccgtgaggctcggggggcaggcgggcgggcttcgcccttcgactgcccccactcgcataggcttgggtcgttccaggcgcgtcaaggccaagccgctgcgcggtcgctgcgcgagccttgacccgccttccacttggtgtccaaccggcaagcgaagcgcgcaggccgcaggccggaggcttttccccagagaaaattaaaaaaattgatggggcaaggccgcaggccgcgcagttggagccggtgggtatgtggtcgaaggctgggtagccggtgggcaatccctgtggtcaagctcgtgggcaggcgcagcctgtccatcagcttgtccagcagggttgtccacgggccgagcgaagcgagccagccggtggccgctcgcggccatcgtccacatatccacgggctggcaagggagcgcagcgaccgcgcagggcgaagcccggagagcaagcccgtagggcgccgcagccgccgtaggcggtcacgactttgcgaagcaaagtctagtgagtatactcaagcattgagtggcccgccggaggcaccgccttgcgctgcccccgtcgagccggttggacaccaaaagggaggggcaggcatggcggcatacgcgatcatgcgatgcaagaagctggcgaaaat

SEQ ID NO: 30 - DNA, 7396 bp, Pseudomonas sp.
tgcctataactgggatctaggagctttcttccatttcccccatggcgtaaatatgagtccatgctggctctaggacgcgcgatccagtctggccggcaagctcagtgctagaaaccaaagcagccccctctacggcttcggtacttcaatgatgaccaacaccactgcaacaccatcaaaacgtgagtggcacggtagccaccactcgtggagctatcgtccgcaggcgtttcggtggctaggagagagaatcgccgggctgaacatcctgccacttgcaggcgatatgcggacgtggatgcagcagcggggacagttagccctaatgccaataccgacacccccttcgtggggtggtttcacgaatccctacaccgctagcggtgtaacattgcaactgctcatggcgcgggccattaatgccgcgcatgagtacgccactaccgacacgccaggccacaacgaaatcgacgcagaggtggagcgagtccgcctttacaacgaagtgctcatgtactcggcacggctctgtgaggtcgcaatcaagcagctcctgtactgcacccagattccagagccccggtacggacgaatggccttgggggcactactagagtccccgtgcccagactgcaagcgtcacgatggtaagaagccccacttggtatccctagttggcacgctggcacacccatttcatttgtgccttgagtttgagcattgcgctatggttcacatggccctggtaaaccggctgcgcaatttagaagcagcacactcgggagttcaaccgctcaacatcaggtctgttgaggcgtccaaattgcagctcatgcaagacaatcaagaagtgctggagggcttcgtgcatatgctgtcccacctagaagaccttgagcgcgaaatgctgcaagacctggctgagaaagctgagtccataaatgcgctcaagaggaacggcctgcctcctgaagactgcaacttcaacctggttcctggcgagaaattcgccttcgccccttagatgccaagttgcagagagctgaatcgttccagaacgcctagatgcagatcgacctgtagtgagcggcacgtatggctagaagggacaacgttggcgttgagtaccgttggcacaacaatctatccatccgcttgaagagctgcgcgcacaactaattaaactgacttcgactcgatccaccgagtgacggcctctctgacgtcgctaacggcctctgcgaacgacaaagatgagctgggtggggcggccctctcaatggcatgccgagcattgagtcctgccgccgttgggctatttgcgtggcggctgatcctgtccaatcgagccttcaattcccatttggctaacggtgccctgtcgctttgcagcagctcaatgagcttgaagagcccgccccagtcgccatccttaagagaggcaagaatctccaaagcgtgcttaacgacaggctgatcgagcacatgccttggccaacggactggcaaaatcctattaccagagctgtcatagacgtcgagatggcacgaactgccgatctgcaacccagccgtcattttggcaaagacatactgggatggaggcatccctgccttccccccgattaccgtcccaacattaaatttcagcccaggagctgccagtgaggctgctgcgctagctgcttgaactatcccttccgcatgatcgtatgcgtcgccggcttctttacagttctttagctcagccggatcgacctccagagtgtcgcccgtcaggaaaagccgagattcaacctgctccagaaaatgctccaggccagtacgactccccacccagttaacggtaacccgccagcgtgcgtccacgtagttccgcctcgtcacggtcagattgtttagaagtctaaagcactgagaaagcaacctggcagaggtgaatcagatagtgctcactctgtccatcctcggtgcttggcaagttgccctgcaactcgccgcgatgctccccatggcaaggagccccgcatacagtacagcggatgttttcggcttggtgttgaccactacaaccccacccttgactcccgcgtaacagcctgtgccgatggtgctgctgtatcgagacgccggttcggcgggtttcgctcttgtagatacttgcaatttctctgctgaggcccagccctacgccatgcccaggtgcactgccgcaccataatttttggcgcatcatacatacaccactacggctctgttgagctcaagccaagtcatatggccgacttttccagttggttgaccctgccgctgagtagtgtccttgatcatgctgaagatcgcgtccgaggtgcggagatttagcccagccatctgctcagctccagacttaccccggcttgttagcggcggctgccccctacaatagatagttacactgcccttaggctaccatgcaggaatgtggactggcctgtccagggctgagtggacactgacttgtggatggaataccccatccctcttggggatatcagacgtaagggatcacgatgtcgacttcgacgattttcagagagttcttggccaatctgcgtattactaacgacgccaccattgaagatcgatatacagagatcacccggtcactgaatagatatttccgggatttggactcaacaagcaacaaccttcaggttggctcttatgggcgttggacagccattgagggcgtgtcagacctagatatgctctacatcatgcccggcagcgcatgggagacctacaacaaggatggggggcagtcagcgctgttgtcagacgcccgagacgcaatcctaaagcgctatcccgctaccaagatcagcgtggatcgcctggttgtctgtgtcaccttccagaacttcaacgttgaggttcagcctgtcttcaggcaggacgatggcagcttcaaataccctgacacctatgacggcggggcatggaaaattaccaagcccaaggacgaaatcgaggccatcaagacagttgatgatgagcagaatggaaacctgcgccgcctgtgcaaaatgcttcgcgcatggaagaacaagcacggtatcggtatcggaggtctgctaatcgataccttggcgcataatttcctcacgtcgacagatgcctatgccactgcaagcttcggatcatacgaccgcatggttagggatttcttcgagtattccaaagaccttccgcagcaagaccgctacgcagctttgggcagccgtcagcatgtgaaggtcaaacagaagttccaaaagcctgctaagcgcgcctatgagctctgcgtcaaagccattgaggcgcaaggcgaggagtatgagggcgaccgctggaggaaggtttttgggcgtagctttccgtcaacccgtacaaccaagcgcagcgccatggaatctttgggttctgcctatagcttcaggaatacagagcagttcatcgaggatctgtatccggttgatattcgttacccactgtcggtcgactgtgatgttgagcaggacggcttcagggagcgtctgctcagtgagctgattcagcttggcctgccgttacgtgcacgtaagaccctcaaattcaaggttacctataacggtgttcctaagccctacagtgtgaagtggaaggtgctgaacaccggagaggaagctgaaagacgcgactgtattcgcggcagtattacgagcgattcaggccgtgaggctattcaggagactacaagcttcaagggtgagcacatggtcgagtgctatatcatcaaggatggggtggttgtagcccgcagcccgattccagtgccgattagcgagaacatatgagccaggcctcactactcaagaatattgccgagacaggctacaacgtgggctttggtggccgtaagcactgggccacctatgacattgtggagaaagtccctggtttcattggtttcctaggcacagccgtgggcatttttgccttggtatacgactcgctttcggcgaaaaacatatctgcaaccatggctgtgattgggattattggcatttatatctctgtctacgactccaagaagtcggagtatgagaagtcagctgtagagctcaccaagatatataacagcctgcgagatctctatcggaaggtgcagtcacttcccgctgatgcggactttaccacctgccagggtgagctttctgacctagaaggacgatattacaatgcgtctattagtaagcaaattctcttcagcgactggtacgcgcattataagttcttttggcaataccagattgattgggtcaacgagcagaagaatttctctttggtcagggataaggttccgttgacggcatggctagctgtggcggcagtcttgttgtctattggcgcttatctagtttcgtgcatcgataccattaaggtttgcctcggaatagcttgacagtccagcagggttcagattcctctggctgctgttcgtcgctcagggtatgtgaatttttggttggtggcgcaacagggggaggcgtaatgactaaagatgtattgttgcatgaggtactccgcaagattcattcgggagtaacgtccttcgagccagtcagcgcgtcacccgacgatatcaagaatttccagagtcttgccaagacagtagtctacgcgcacagtcagggctacattgatcatatgattcctcacagggatttcacatctgttaatgggaattatgctgttatcttggtgagcggagggcttacctacaacggtgagcagcttctacagcaattttcaggcaaacccacgccgctagatgaatctctagctgacctattcgaaagaatcccaagctacagcgttcgagagaaatgggagaaagcccttcatcgacgcatctcagacccaagcggcgctatcactgcggctagagccctgcttgagtcgacgctgaagtggatcattgagcagcatggtggaaagcctactgataataataaagagcttttcagtaaggccattgatgctcttggattagaggtaaaaggcaagcccattgaaaaaaccattgagggtttgaactcaatcatctggggcataggtgacatgaggaacaagcatggcgatgcacatggcgcggcatcggatgccatcgctccgacaaagagtgaagctggtttctgcgttaacctagccggcgcagcggctttatttctcttggaagtttttgagtcgagtaagtgatctttgaatcgccatgccctttaaattgaaaaaaccacatctccctgctcgcacaagatttggcgatgcttgaacttggcaactgagcacaatctataaagactcagagctttctctatctccacgttttctctcttgagtatattctttccgcagagtggcgattgcagaggatatttttttgtcgacgcttatgctaatttctctctttagatcagattcctgcttcttatcccaccatgcctcataggtaacttgaaacagtgggtgagagagaaggactcctattattactgtgggcttgccaccgctggctgaagtccagagcactccagcaaccacaacgcaactgagcaccagtagcgttagcggggcgataagttcacacgccgcaaaagttgcaccacctaaaaaggggagccgatgccgaaggcagaatgtcatgtagctgaaaatcgagcccccgccaaaaccaataataaagtcagtaacccacccactgtagccgctatcagccagcaagatcagcgtgaaaaagataacaacacaaagggcaatgtatatatttctgactctttctcgatcatatagatcaaacttcacttcgactacctcaaagaaaccgatgggcaacacaagaaatcaaggcaaatggcgccgcttacacttcactaggctgggactctaagaggaactgtgtcgacgtgtcttgatcgactctatcccacttatctctagacactttagtctgttcaaaccattccacccagatatcaagacaatcgtagtcggtgaatctaccaatccgatctgacgtcttagagctgtaggtgccattttctattgccgcccagctaaatggggtggccatcattatcttggctccgtagggagtcaatttcagatctagcatggcatctatcagcgtttgtatgttcaatcgtccgccaccgcttgatgagaatgagcacaataaatttccagcaacgtgcttcacaaggcctgcttcatatttttcaaaagttatgtagcaatatagattcccttgcgcctctatagatcgaggcacggtaattatcgcgggggtaaagcccagcttcagataatcgatcatggtgcttttatttatgggaaatctaacgaatacttcttgcgtcccgccatctaggtaatctggatttacaccaaattcttgctctatgtaccgagtaatatggatcggcgtctcttcaactccagactcatacttctcaagctgcgatacactttcgatattgagcttttcgcacatctggcgcttagagaaaccaagcagactttcacggatataacgaattctcccgcctacttctagagcataatctccggcgttgtcagtattaggagcatgaggtatttgatgctgctcttctctggcaggaagggccttgtcaactagattccctatcactttttccataatgacttttgcaattgcctcgactgcggacttcaaagataggagtactgcaattacatctgtcatatctgtacccatggttggcagcgggaggattggaagataatggcaccccgtatgccatgatttccatagattcaaagaggacaagcgtgcagatagtcagtgaaacgttatggccgcgtctgtcgcagttctaaagcctcttgactctctggagcttgtgcagcccatggatgtcttcatcccacaaataccccgcaagcattcgcaatgctgacgaaccactctgctcgctcaccgtcgatcaggatcacgactcgtctgttgctgatgaagtcaccatcgtagctcatcgagtagtcatcgacttgcaggcgctagcccggctggatgacggatcccgctgcgatgccgtccgcgaaagcgcaacccgcagttttgtaatcatcgatgccgtcatctgcactcgcaaaagcgtacaagcggcgacgaatgtatgtgactgagtattcgcatgaaagccgccaggcgttcgcatcggccgccgccattcaggcgcacgcaaaaccgacaggctctcgcatagtccgccactaggtcttgggccctttggcctctgccgtactctacccagtaagcggacagtgccgtcacatggctgaacaaatgtat

SEQ ID NO: 31 - DNA, 5447 bp, Pseudomonas sp.
cgaaagacttgatcgaaacgctctttaacaactgaatcaagcaattcgtgtgggtgcttgtgaggtaagactggtagtcagcaagattatcagcatcacaaatactcaacgagaaatcattgagtgctcatctcttagggggtgagattgcgattgctgagccaagtttagggttttctcaaaacccaagcagtattgaactgaagagtttgatcatggctcagattgaacgctggcggcaggcctaacacatgcaagtcgagcggatgagtggagcttgctccatgattcagcggcggacgggtgagtaatgcctaggaatctgcctggtagtgggggacaacgtttcgaaaggaacgctaataccgcatacgtcctacgggagaaagcaggggaccttcgggccttgcgctatcagatgagcctaggtcggattagctagttggtgaggtaatggctcaccaaggcgacgatccgtaactggtctgagaggatgatcagtcacactggaactgagacacggtccagactcctacgggaggcagcagtggggaatattggacaatgggcgaaagcctgatccagccatgccgcgtgtgtgaagaaggtcttcggattgtaaagcactttaagttgggaggaagggcagtaagttaataccttgctgttttgacgttaccgacagaataagcaccggctaacttcgtgccagcagccgcggtaatacgaagggtgcaagcgttaatcggaattactgggcgtaaagcgcgcgtaggtggtttgttaagttggatgtgaaagccccgggctcaacctgggaactgcatccaaaactggcaagctagagtatggcagagggtggtggaatttcctgtgtagcggtgaaatgcgtagatataggaaggaacaccagtggcgaaggcgaccacctgggctaatactgacactgaggtgcgaaagcgtggggagcaaacaggattagataccctggtagtccacgccgtaaacgatgtcgactagccgttgggatccttgagatcttagtggcgcagctaacgcattaagtcgaccgcctggggagtacggccgcaaggttaaaactcaaatgaattgacgggggcccgcacaagcggtggagcatgtggtttaattcgaagcaacgcgaagaaccttaccaggccttgacatgcagagaactttccagagatggattggtgccttcgggaactctgacacaggtgctgcatggctgtcgtcagctcgtgtcgtgagatgttgggttaagtcccgtaacgagcgcaacccttgtccttagttaccagcacgtgatggtgggcactctaaggagactgccggtgacaaaccggaggaaggtggggatgacgtcaagtcatcatggcccttacggcctgggctacacacgtgctacaatggtcggtacaaagggttgccaagccgcgaggtggagctaatcccataaaaccgatcgtagtccggatcgcagtctgcaactcgactgcgtgaagtcggaatcgctagtaatcgtgaatcagaatgtcacggtgaatacgttcccgggccttgtacacaccgcccgtcacaccatgggagtgggttgctccagaagtagctagtctaaccttcgggaggacggttaccacggagtgattcatgactggggtgaagtcgtaacaaggtagccgtaggggaacctgcggctggatcacctccttaatcgaagacttcagcttcttcataagttcccacacgaattgcttgattcactagcgaaaagcgattgggtttcgacccgagagagacgattgggtctgtagctcagttggttagagcgcacccctgataagggtgaggtcggcagttcgaatctgcccagacccaccaattgtcatgggatgtggccgatctgtagatggggccatagctcagctgggagagcgcctgctttgcacgcaggaggtcagcggttcgatcccgcttggctccaccattaactcgataatcgctgaaagcacagaaatgaatagactcggatgagtgtattgatttctggtctttgcgccagtaactgttctttaaaaatttgggtatgtgatagaagtagatttgggtaatcattttcactgatgattattcaagtcaaggtaaaatttgcgagttgctcgagagagcgaaatgcggattttcggcgaatgtcgtcttcacgttatagacagtaaccagattgcttggggttatatggtcaagtgaagaagcgcatacggtggatgccttggcagtcagaggcgatgaaagacgtggtagcctgcgaaaagcttcggggagtcggcaaacagactgtgatccggagatgtctgaatgggggaacccagccatcataagatggttatcacacactgaatacataggtgtgtgaggcgaaccaggggaactgaaacatctaagtaccctgaggaaaagaaatcaaccgagattcccttagtagtggcgagcgaacggggactagcccttaagcttctttgattttagcggaacgctctggaaagtgcggccatagtgggtgatagccctgtacgcgaaaggatcttagaagtgaaatcgagtaggacggagcacgagaaactttgtctgaatatggggggaccatcctccaaggctaaatactactgactgaccgatagtgaaccagtaccgtgagggaaaggcgaaaagaaccccggagaggggagtgaaatagaacctgaaaccgtatgcgtacaagcagtgggagcctactttgttaggtgactgcgtaccttttgtataatgggtcagcgacttattttcagtggcgagcttaaccgaataggggaggcgtagcgaaagcgagtcttaatagggcgtctagtcgctgggaatagacccgaaaccgggcgatctatccatgggcaggttgaaggttgggtaacactaactggaggaccgaaccgactaccgttgaaaagttagcggatgacctgtggatcggagtgaaaggctaatcaagctcggagatagctggttctcctcgaaagctatttaggtagcgcctcgtgtatcactgctgggggtagagcactgtttcggctagggggtcatcccgacttaccaaaccgatgcaaactccgaataccagcaagtgtcagcacgggagacacacggcgggtgctaacgtccgtcgtgaaaagggaaacaacccagaccgtcagctaaggtcccaaaatcctggttaagtgggaaacgatgtgggaaggcttagacagctaggaggttggcttagaagcagccatcctttaaagaaagcgtaatagctcactagtcgagtcggcctgcgcggaagatgtaacggggctcaaaccaggtaccgaagctacgggttcatcgtaagatgagcggtagaggagcgttctgtaagcctgtgaaggtgagttgagaagcttgctggaggtatcagaagtgcgaatgctgacatgagtaacgacaatgcgagtgaaaaactcgcacgccgaaagaccaagggttcctgcgcaacgttaatcgacgcagggtgagtcggtccctaaggcgaggctgaagagcgtagtcgatgggaaacgggttaatattcccgtacttctagttactgcgatggggggacggagaaggctaggccagcttggcgttggttgtccaagtttaaggtggtaggcagagatcttaggtaaatccggggtcttaatgccgagaactgatgacgatccttcttttagaaggagaagtggttgatgccatgcttccaggaaaagcctctaagcttcaggtaactaggaaccgtaccccaaaccgacacaggtggttgggtagagaataccaaggcgcttgagagaactcgggtgaaggaactaggcaaaatggcaccgtaacttcgggagaaggtgcgccggtgagggtgaagggtttaccccgtaagctcatgccggtcgaagataccaggccgctgcgactgtttattaaaaacacagcactctgcaaacacgaaagtggacgtatagggtgtgacgcctgcccggtgccggaaggttaattgatggggttagcgcaagcgaagctcttgatcgaagccccggtaaacggcggccgtaactataacggtcctaaggtagcgaaattccttgtcgggtaagttccgacctgcacgaatggcgtaacgatggcggcgctgtctccacccgagactcagtgaaattgaaatcgctgtgaagatgcagtgtatccgcggctagacggaaagaccccgtgaacctttactatagctttgcactggactttgaatttgcttgtgtaggataggtgggaggctttgaagcgtggacgccagttcgcgtggagccatccttgaaataccaccctggcaactttgaggttctaactctggtccgttatccggatcgaggacagtgtatggtgggtagtttgactggggcggtctcctcctaaagagtaacggaggagtacgaaggtgcgctcagaccggtcggaaatcggtcgtagagtataaaggcaaaagcgcgcttgactgcgagacagacacgtcgagcaggtacgaaagtaggtcttagtgatccggtggttctgtatggaagggccatcgctcaacggataaaaggtactccggggataacaggctgataccgcccaagagttcatatcgacggcggtgtttggcacctcgatgtcggctcatcacatcctggggctgaagccggtcccaagggtatggctgttcgccatttaaagtggtacgcgagctgggtttagaacgtcgtgagacagttcggtccctatctgccgtggacgtttgagatttgagaggggctgctcctagtacgagaggaccggagtggacgaacctctggtgttccggttgtcacgccagtggcattgccgggtagctatgttcggaagagataaccgctgaaagcatctaagcgggaaacttgcctcaagatgagatctcactggagccttgagctccctgaagggccgtcgaagactacgacgttgataggtggggtgtgtaagcgctgtgaggcgttgagctaacccatactaattgcccgtgaggcttgaccatataacacccaaacaatttgatgtttgcgtgtcagacggttgaagtcgacaaacaaaccgaaaagacgcatcgctcgcaaagcgaacctaatacgcaacaccgcaatacttcacatacccaattaggggaagcgactcaacaccgactccccaaccgaattgcttgacgaccatagagcgttggaaccacctgatcccatcccgaactcagaagtgaaacgacgcatcgccgatggtagtgtggggtctccccatgtgagagtaggtcatcgtcaagcttctacaccaaacccccgatc

SEQ ID NO: 32 - DNA, 1235 bp, Pseudomonas sp.
tgtagtggtcaacccatcccggacagtgggttaagtttttcttcggccaccgcaggcggtaacccgtcgttgaattgatgcggtctgatccagttgtagcggtgcatcaggtagtggctgatgtcccgctgagcttcctgtgccgtcaggtaaccggtctgcggtatccactccgacttcaggctgcggaataggcgttccatcggcgagttgtcccaacaattaccccggcggctcatgctctgctgcattcggtagcgccatagccgctgccggaacaagcggctggcgtactggctgccctgatccgaatggaacagcacctgctgtggcttgccgcgctgctcgtaggccatatcgagggctttgattaccagctcggcatccggtttggcggagaacgcccagccaaccacccgacgcgtgtgcagatccagcaccgcggccaggtaatgccaacaaccttgcgcccagacgtaggtgatgtcgccgcaccacacttggttcgggcgctgaactgcgaactcacggttcagtcgattcgggatatccgggcgctcaaccgtggcctgcttgtaggcgtgtgagcccggctgcttgctgaccagccccaactcacgcatcagtcgacgcacacgaaaacggccaatctctacgccttcctcgcgcagcatgcccaggatgcttcggctgccagccgaaccccggctttggctaaacaactcgttgacgcgactgcgcagcgcaacgcgacgagcatcaatacggcgacgtcggaggcgatgggcgtaatagcacgaccgcgccacatcgaacgctgaacagaccacttctaccggctcctgctcactcaactggtctatcagcgcgtacgatcgagttcgtccgacatcaagagagcggtagccttttttaatatcgccttctcccgttccagccggttgatcctggcctctagctcctggatcttctgctgctcgggtgtcagcgctttgctttttggggtaacgccctggcgctcgtcttggagttgtttcacccatcgccgcaaagccgagtccacgacgcccagcgaacggcaggcctcgatatggctgtagccctgatctagtactaaggcagctgcctctcgtttgaactcggctgaaaacgtacgtcgttgtttgctcatcgaacacctcttaatggcgaggattttcgcctaaatcggtgtccgggatcagtagaccactaca

SEQ ID NO: 33 - DNA, 523 bp, Pseudomonas sp.
cgccgatatcgacaagaaaaccctgaccgccaccgccgacgtggccgacaaggtctacgatggcaataccacggcggccctcagcaacgtccagctgatcggcgtggtggccggagacgctggcaaggtaagcactagcggcagtacaggttcgttcgtcgacaagaacgccggccaggacaaatcggtgagcggttcgggcattgccctgagcggtgacgaggcaaacaactacgccttcgataccagcgcgcaaatcggcacggccgacatcgacaggaaaactctgactgccacagctgacgtggccgacaagatctacgacggcaacaccacggcaaacctcagcaacgtgcagctgatcggcgtggtagctggcgatgctggcaaggtaatcaccagcggcagcaccggcagcttcgttgacaagaatgccggccgggacaaatcggtgagtggttcggggatcggcctgattggtgacgaggcaaacaactatgcgttcgataccagcgcgcagatt

SEQ ID NO: 34 - DNA, 509 bp, Pseudomonas sp.
gagtaccgcttcgaaacctacttctcgctgtcctgccagaactgcccggacgtggtccaggcgctgaacctgatggccgtgctcaacccgaacatccatcacgtcgccatcgacggtgcgctgttccaggaagaagtcacggtgcgccaggtcatgtcggtgccgagtatctatctcaacggtgagctgttcggccagggtcgcatgggcgaggaagaaatcctcgccaagctcgacaccggcgcctcggcgcgcgatgccgagaagctcagcgccaaggacgccttcgacgtgctcgtcgttggcggtggtccagccggtgccgcggcggccatctatgccgcgcgcaagggcatccgtaccggtgtcgcggccgagcgcttcggtggccaggtgctggacaccatggccatcgagaacttcatctcggtcaacgagaccgaaggcccgaaactggctcgtgcgctggaaaaccacgtgcgcgaatacgacgtcgacatcatgaacct

SEQ ID NO: 35 - DNA, 398 bp, Pseudomonas sp.
gcaactggcccaggccatgtaaaaacgcagcgggcgatggatagctggatattggattgttttagcggcgcccagaggccctacgggctcctggtgtgtcgatccgatgtattcagccaattcgggcaagtgtgtatctgcgatgcttggcgatgagttcaacgatctgccaatggggtttcagaccctcatcgcagccatcagcgcgccattgcccagcagattcagcacccgtttgaagttgtaggcgagcacatgcaggctcatttccgtgctcacccggtcgagcgttcgggtgaggaaatgagtagcgcccatccaggccttcaacgtgccgaatggatgctccaccgtctgacggcggatgcgcatcatctccggtgcctgatccagacgag

SEQ ID NO: 36 - DNA, 350 bp, Pseudomonas sp.
acagcgcgccgcccagctgattcccgccgagaaggccggcggactgcacgaaatcaagctggagaacggcgcctcgctgaaggccaagacgctgatcctggccaccggcgcgcgctggcgcgaaatgaacgtgcccggcgagcaggaataccgcggccgtggcgtcgcctactgcccgcattgcgacggcccgctgttcaagggcaagcgcgtcgcggtgatcggcggtggcaactcgggcgtggaggcggccatcgacctggccggtatcgtcgcccaggtcacgctgctcgaattcgacagccagctgcgcgccgacgcggtgctacagaagaagctcaacagcctgc

SEQ ID NO: 37 - DNA, 350 bp, Pseudomonas sp.
aaaggctgttgagcttcttctgtagcaccgcgtcggcgcgcagctggctgtcgaattccagcagcgtgacctgggcgacgataccggccaggtcgatggccgcctccacgcccgagttgccaccgccgatcactgccacacgcttgcccttgaacagcgggccgtcgcaatgcgggcagtaggcgacgccacggccgcggtattcctgctcaccgggcacgttcatttcgcgccagcgcgcgccggtggccaggatcagcgccttggccttcagcgaggcaccgttctccagcttgatttcgtgcagtccgccggccttctcggcgggaatcagctgggccgcgcgctgc

SEQ ID NO: 38 - DNA, 295 bp, Pseudomonas sp.
tctcaaccgaggccgcgcattctacagcagccttgtgtctcgtcaagctgtttttgaagaagtttttctttcttctcaaccgcttgcgcttccggtcaacctagcgtctctcgtcagcgggaggcgaatcatacagcgttcaaaaccgctgtcaaccacctcttttaccgcctccgatcaacccgaccgaagccgccaacagcgctcaaccaccgccctgccagcccggcgcattctactcgaattcgccgtccgtgcaacccttaattttcgctaacttcttgatttacaagag

SEQ ID NO: 39 - DNA, 290 bp, Pseudomonas sp.
ccaatgtcaccgtgatcaccagcgcgctgaccagcgaagtccacggcgacgggcagaaggttaccgggctgacctacaaggaccgcaactccagcgagttccaccagctggagcttgaaggcatcttcgtgcagatcggcctgctgccgaattccgactggctgaagggcacggtggagctgacctcacgcggcgagatcatcgtcgatgcacgcggcgagacttcgctgccgggcatcttcgccgccggcgacgtgaccaccgtgccgtacaagcagatcgtcattgcg

SEQ ID NO: 40 - DNA, 277 bp, Pseudomonas sp.
ggccgcgccggtagtgccgtcgtagaccttgtcggctacatcggcggtggcggtcagggttttcttggcgatgtcagcagtgccgatctgcgcgccagtatcgaaggcgtagttgtccgcctcgtcaccagtcaggccgatgcccgagccgctcaccgatttgtcctgaccggcattcttgtcgacgaacgaacccatgctgccgctggtgcttaccttgccagcgtcgccgactactacaccgatcagttggacgttgctgagatcggccgcagta

SEQ ID NO: 41 - DNA, 264 bp, Pseudomonas sp.
gttcgtcgacaagaacgccggtcaggacaaatcggtgagcggctcgggcatcggcctgactggtgacgaggcgaacaactacgccttcgataccggcgcgcggatcggcacggccgacatcgacaggaaaactctgactgccaccgctaacgtggccgacaaggtctacgacggcaacaccactgcaaacctcagcaatgtgcagctgatcggcgtggtagccggcgacgctggcaaggtaagcaccagcggcagtacgggttc

SEQ ID NO: 42 - DNA, 259 bp, Pseudomonas sp.
gatctgcgcgctggtatcgaaggcatagttgttcgcctcatcgccggtcaggccgatgcccgaaccgctcaccgatttttcctgaccggcgttcttgtcgacgaacgaacccgtactgccgctagtgcttaccttgccagcgtcgccggctaccacgccgatcagctgcacattgctgaggtttgcagtggtgttgccgtcgtagaccttgtcggccacgttagcgctggcagtcagagttttcctgtcgatgtcggcc

SEQ ID NO: 43 - DNA, 210 bp, Pseudomonas sp.
gggccgacgggcttttcggcccgagcacaactggccatcaggctaaacgccaagctttcgtgggagcggtcttgaccgcgaagaggactgcacgaggtttagccgatcacggacgaaaccagagccgttagtagcggcctcggcaagtcgcagatattcacccgcttgctcgccttttcgcggtcaagaccgctcccacagatcgggcgg

SEQ ID NO: 44 - DNA, 192 bp, Pseudomonas sp.
gaataaaacacaagctggcgtaggcggacgcttgaccaccgaactggcctggaacaccgccccctctccccagaggggcgagagggttgggtcgtgcggaatttggagcgcgatggcggctcgcggcggtgctcgcgcgttgccgatacagcggacgagccgtggtgcgcgtcgcttggctgaagccctttc

SEQ ID NO: 45 - DNA, 185 bp, Pseudomonas sp.
gtgccgatctgcgcgccggtatcgaaggcgtagttgttcgcctcgtcaccagtcaggccgatgcccgagccgctcaccagcttgtcctggcctgcgtttttatcgacgaacgaacccgtgctgccgctggtgcttaccttgccagcgtcgccggctaccacgccgatcagctggacgttgctgag

SEQ ID NO: 46 - DNA, 177 bp, Pseudomonas sp.
gttcgtcgacaagaacgccggtcaggacaaatcggtgagcggctcgggcatcggcctgaccggcgatgaggcgaacaactatgccttcgataccagcgcgcagatcggcaccgccgatatcgacaagaaaaccctgaccgccaccgccgatgtcgccgacaaggtctacgacggcac

SEQ ID NO: 47 - DNA, 148 bp, Pseudomonas sp.
ccgccccctcaccccagccctctccccagaggggcgagggggttgggtcgtgcggaatttggagcgcgatggcgactcgacgcaatactcgcgcgttgccgatacagcggacgagccgtggtgcgcgtcgcttggctgaagccctttc

SEQ ID NO: 48 - DNA, 113 bp, Pseudomonas sp.
accgatccacgcgttcatcgagcccggtgcaacccggtggtggatgtaaaaagcgacatcgaccctacgagctgatggcagtgttaaacccgtacggggtggatcatgccttc

SEQ ID NO: 49 - DNA, 1578 bp, Saccharomyces cerevisiae
atgaatgaaatcgatgagaaaaatcaggcccccgtgcaacaagaatgcctgaaagagatgattcagaatgggcatgctcggcgtatgggatctgttgaagatctgtatgttgctctcaacagacaaaacttatatcgaaacttctgcacatatggagaattgagtgattactgtactagggatcagctcacattagctttgagggaaatctgcctgaaaaatccaactcttttacatattgttctaccaacaagatggccaaatcatgaaaattattatcgcagttccgaatactattcacggccacatccagtgcatgattatatttcagtattacaagaattgaaactgagtggtgtggttctcaatgaacaacctgagtacagtgcagtaatgaagcaaatattagaagaattcaaaaatagtaagggttcctatactgcaaaaatttttaaacttactaccactttgactattccttactttggaccaacaggaccgagttggcggctaatttgtcttccagaagagcacacagaaaagtggaaaaaatttatctttgtatctaatcattgcatgtctgatggtcggtcttcgatccacttttttcatgatttaagagacgaattaaataatattaaaactccaccaaaaaaattagattacattttcaagtacgaggaggattaccaattattgaggaaacttccagaaccgatcgaaaaggtgatagactttagaccaccgtacttgtttattccgaagtcacttctttcgggtttcatctacaatcatttgagattttcttcaaaaggtgtctgtatgagaatggatgatgtggaaaaaaccgatgatgttgtcaccgagatcatcaatatttcaccaacagaatttcaagcgattaaagcaaatattaaatcaaatatccaaggtaagtgtactatcactccgtttttacatgtttgttggtttgtatctcttcataaatggggtaaatttttcaaaccattgaacttcgaatggcttacggatatttttatccccgcagattgccgctcacaactaccagatgatgatgaaatgagacagatgtacagatatggcgctaacgttggatttattgacttcaccccctggataagcgaatttgacatgaatgataacaaagaaaatttttggccacttattgagcactaccatgaagtaatttcggaagctttaagaaataaaaagcatctccatggcttagggttcaatatacaaggcttcgttcaaaaatatgtgaacattgacaaggtaatgtgcgatcgtgccatcgggaaaagacgcggaggtacattgttaagcaatgtaggtctgtttaatcagttagaggagcccgatgccaaatattctatatgcgatttggcatttggccaatttcaaggatcctggcaccaagcattttccttgggtgtttgttcgactaatgtaaaggggatgaatattgttgttgcttcaacaaagaatgttgttggtagtcaagaatctctcgaagagctttgctccatttacaaagctctccttttaggcccttag

SEQ ID NO: 50 - protein, 525 aa, Saccharomyces cerevisiae
MNEIDEKNQAPVQQECLKEMIQNGHARRMGSVEDLYVALNRQNLYRNFCTYGELSDYCTRDQLTLALREICLKNPTLLHIVLPTRWPNHENYYRSSEYYSRPHPVHDYISVLQELKLSGVVLNEQPEYSAVMKQILEEFKNSKGSYTAKIFKLTTTLTIPYFGPTGPSWRLICLPEEHTEKWKKFIFVSNHCMSDGRSSIHFFHDLRDELNNIKTPPKKLDYIFKYEEDYQLLRKLPEPIEKVIDFRPPYLFIPKSLLSGFIYNHLRFSSKGVCMRMDDVEKTDDVVTEIINISPTEFQAIKANIKSNIQGKCTITPFLHVCWFVSLHKWGKFFKPLNFEWLTDIFIPADCRSQLPDDDEMRQMYRYGANVGFIDFTPWISEFDMNDNKENFWPLIEHYHEVISEALRNKKHLHGLGFNIQGFVQKYVNIDKVMCDRAIGKRRGGTLLSNVGLFNQLEEPDAKYSICDLAFGQFQGSWHQAFSLGVCSTNVKGMNIVVASTKNVVGSQESLEELCSIYKALLLGP

SEQ ID NO: 51 - DNA, 1608 bp, Saccharomyces cerevisiae
atggaagatatagaaggatacgaaccacatatcactcaagagttgatagaccgtggccatgcaagacgtatgggccacttggaaaactactttgctgttttgagtaggcagaaaatgtactcgaattttactgtttacgcggaattgaataaaggtgttaataagagacaactaatgcttgtcttgaaagtattacttcaaaaatactcaactcttgcgcatacaatcattcctaagcattatcctcatcatgaagcgtactactctagcgaagagtaccttagtaaaccttttccacagcatgatttcataaaggtgatttctcatcttgaattcgatgacttgattatgaataatcaaccagaatacagagaagtcatggagaaaatctcagaacagttcaaaaaggatgatttcaaagtcaccaataggttaatcgaattgattagccctgtaatcatacctctgggtaatccgaagaggcctaattggagattgatttgtttaccaggtaaggatactgatgggtttgaaacgtggaaaaacttcgtttatgtcactaaccactgcggctccgacggtgtcagtggatcgaattttttcaaagatttagctctactcttttgtaaaatcgaagaaaaagggtttgattatgatgaagagttcatcgaagatcaagtcatcattgactatgatcgagactacactgaaatttctaaattgccaaaaccgattacggatcgtattgactacaagccagcattgacttcattacccaaattctttttaacaaccttcatttatgaacattgtaattttaaaacctccagcgaatctacacttacagctagatatagcccctctagtaatgctaatgctagttacaattacttgttgcatttcagtactaagcaagtagaacaaatcagagctcagatcaagaaaaatgttcacgatgggtgcaccctaacacccttcattcaagcgtgctttcttgtagccctgtatagactggataagctgttcacaaaatctcttctcgagtatgggttcgatgtggctattccaagcaacgcaagaaggtttttaccaaacgatgaagagttaagagattcttataaatacggctccaacgttggaggttcgcattacgcctatctaatctcctcattcgacattcccgaaggtgacaatgacaagttttggagtcttgtcgaatactactatgaccgctttttagaatcgtacgacaacggtgaccacttgattggtctgggggtcctacaacttgattttatcgttgaaaacaagaatatagacagccttcttgccaactcttatttgcaccagcaaagaggcggtgcaatcatcagtaatacaggacttgtctcgcaagatacgaccaagccgtactacgttcgggatttaatcttctcgcagtctgcaggcgccttgagatttgcgttcggcctaaacgtttgctccacaaacgtgaatggtatgaacatggacatgagcgtggttcagggcactctacgggatcgtggcgaatgggaatcgttctgcaagctcttctaccaaaccatcggcgaatttgcgtcgctttaa

SEQ ID NO: 52 - protein, 535 aa, Saccharomyces cerevisiae
MEDIEGYEPHITQELIDRGHARRMGHLENYFAVLSRQKMYSNFTVYAELNKGVNKRQLMLVLKVLLQKYSTLAHTIIPKHYPHHEAYYSSEEYLSKPFPQHDFIKVISHLEFDDLIMNNQPEYREVMEKISEQFKKDDFKVTNRLIELISPVIIPLGNPKRPNWRLICLPGKDTDGFETWKNFVYVTNHCGSDGVSGSNFFKDLALLFCKIEEKGFDYDEEFIEDQVIIDYDRDYTEISKLPKPITDRIDYKPALTSLPKFFLTTFIYEHCNFKTSSESTLTARYSPSSNANASYNYLLHFSTKQVEQIRAQIKKNVHDGCTLTPFIQACFLVALYRLDKLFTKSLLEYGFDVAIPSNARRFLPNDEELRDSYKYGSNVGGSHYAYLISSFDIPEGDNDKFWSLVEYYYDRFLESYDNGDHLIGLGVLQLDFIVENKNIDSLLANSYLHQQRGGAIISNTGLVSQDTTKPYYVRDLIFSQSAGALRFAFGLNVCSTNVNGMNMDMSVVQGTLRDRGEWESFCKLFYQTIGEFASL

SEQ ID NO: 53 - DNA, 1131 bp, Saccharomyces cerevisiae
atgaccttggcacccctagacgcctccaaagttaagataactaccacacaacatgcatctaagccaaaaccgaacagtgagttagtgtttggcaagagcttcacggaccacatgttaactgcggaatggacagctgaaaaagggtggggtaccccagagattaaaccttatcaaaatctgtctttagacccttccgcggtggttttccattatgcttttgagctattcgaagggatgaaggcttacagaacggtggacaacaaaattacaatgtttcgtccagatatgaatatgaagcgcatgaataagtctgctcagagaatctgtttgccaacgttcgacccagaagagttgattaccctaattgggaaactgatccagcaagataagtgcttagttcctgaaggaaaaggttactctttatatatcaggcctacattaatcggcactacggccggtttaggggtttccacgcctgatagagccttgctatatgtcatttgctgccctgtgggtccttattacaaaactggatttaaggcggtcagactggaagccactgattatgccacaagagcttggccaggaggctgtggtgacaagaaactaggtgcaaactacgccccctgcgtcctgccacaattgcaagctgcttcaaggggttaccaacaaaatttatggctatttggtccaaataacaacattactgaagtcggcaccatgaatgcttttttcgtgtttaaagatagtaaaacgggcaagaaggaactagttactgctccactagacggtaccattttggaaggtgttactagggattccattttaaatcttgctaaagaaagactcgaaccaagtgaatggaccattagtgaacgctacttcactataggcgaagttactgagagatccaagaacggtgaactacttgaagcctttggttctggtactgctgcgattgtttctcccattaaggaaatcggctggaaaggcgaacaaattaatattccgttgttgcccggcgaacaaaccggtccattggccaaagaagttgcacaatggattaatggaatccaatatggcgagactgagcatggcaattggtcaagggttgttactgatttgaactga

SEQ ID NO: 54 - protein, 376 aa, Saccharomyces cerevisiae
MTLAPLDASKVKITTTQHASKPKPNSELVFGKSFTDHMLTAEWTAEKGWGTPEIKPYQNLSLDPSAVVFHYAFELFEGMKAYRTVDNKITMFRPDMNMKRMNKSAQRICLPTFDPEELITLIGKLIQQDKCLVPEGKGYSLYIRPTLIGTTAGLGVSTPDRALLYVICCPVGPYYKTGFKAVRLEATDYATRAWPGGCGDKKLGANYAPCVLPQLQAASRGYQQNLWLFGPNNNITEVGTMNAFFVFKDSKTGKKELVTAPLDGTILEGVTRDSILNLAKERLEPSEWTISERYFTIGEVTERSKNGELLEAFGSGTAAIVSPIKEIGWKGEQINIPLLPGEQTGPLAKEVAQWINGIQYGETEHGNWSRVVTDLN

SEQ ID NO: 55 - DNA, 1830 bp, Saccharomyces cerevisiae
atgaattctagctatacacagagatatgcactgccgaagtgtatagcaatatcagattatcttttccatcggctcaaccagctgaacatacataccatatttggactctccggagaatttagcatgccgttgctggataaactatacaacattccgaacttacgatgggccggtaattctaatgagttaaatgctgcctacgcagcagatggatactcacgactaaaaggcttgggatgtctcataacaacctttggtgtaggcgaattatcggcaatcaatggcgtggccggatcttacgctgaacatgtaggaatacttcacatagtgggtatgccgccaacaagtgcacaaacgaaacaactactactgcatcatactctgggcaatggtgatttcacggtatttcatagaatagccagtgatgtagcatgctatacaacattgattattgactctgaattatgtgccgacgaagtcgataagtgcatcaaaaaggcttggatagaacagaggccagtatacatgggcatgcctgtcaaccaggtaaatctcccgattgaatcagcaaggcttaatacacctctggatttacaattgcataaaaacgacccagacgtagagaaagaagttatttctcgaatattgagttttatatacaaaagccagaatccggcaatcatcgtagatgcatgtactagtcgacagaatttaatcgaggagactaaagagctttgtaataggcttaaatttccagtttttgttacacctatgggtaagggtacagtaaacgaaacagacccgcaatttgggggcgtattcacgggctcgatatcagccccagaagtaagagaagtagttgattttgccgattttatcatcgtcattggttgcatgctctccgaattcagcacgtcaactttccacttccaatataaaactaagaattgtgcgctactatattctacatctgtgaaattgaaaaatgccacatatcctgacttgagcattaaattactactacagaaaatattagcaaatcttgatgaatctaaactgtcttaccaaccaagcgaacaacccagtatgatggttccaagaccttacccagcaggaaatgtcctcttgagacaagaatgggtctggaatgaaatatcccattggttccaaccaggtgacataatcataacagaaactggtgcttctgcatttggagttaaccagaccagatttccggtaaatacactaggtatttcgcaagctctttggggatctgtcggatatacaatgggggcgtgtcttggggcagaatttgctgttcaagagataaacaaggataaattccccgcaactaaacatagagttattctgtttatgggtgacggtgctttccaattgacagttcaagaattatccacaattgttaagtggggattgacaccttatatttttgtgatgaataaccaaggttactctgtggacaggtttttgcatcacaggtcagatgctagttattacgatatccaaccttggaactacttgggattattgcgagtatttggttgcacgaactacgaaacgaaaaaaattattactgttggagaattcagatccatgatcagtgacccaaactttgcgaccaatgacaaaattcggatgatagagattatgctaccaccaagggatgttccacaggctctgcttgacaggtgggtggtagaaaaagaacagagcaaacaagtgcaagaggagaacgaaaattctagcgcagtaaatacgccaactccagaattccaaccacttctaaaaaaaaatcaagttggatactga

SEQ ID NO: 56 - protein, 609 aa, Saccharomyces cerevisiae
MNSSYTQRYALPKCIAISDYLFHRLNQLNIHTIFGLSGEFSMPLLDKLYNIPNLRWAGNSNELNAAYAADGYSRLKGLGCLITTFGVGELSAINGVAGSYAEHVGILHIVGMPPTSAQTKQLLLHHTLGNGDFTVFHRIASDVACYTTLIIDSELCADEVDKCIKKAWIEQRPVYMGMPVNQVNLPIESARLNTPLDLQLHKNDPDVEKEVISRILSFIYKSQNPAIIVDACTSRQNLIEETKELCNRLKFPVFVTPMGKGTVNETDPQFGGVFTGSISAPEVREVVDFADFIIVIGCMLSEFSTSTFHFQYKTKNCALLYSTSVKLKNATYPDLSIKLLLQKILANLDESKLSYQPSEQPSMMVPRPYPAGNVLLRQEWVWNEISHWFQPGDIIITETGASAFGVNQTRFPVNTLGISQALWGSVGYTMGACLGAEFAVQEINKDKFPATKHRVILFMGDGAFQLTVQELSTIVKWGLTPYIFVMNNQGYSVDRFLHHRSDASYYDIQPWNYLGLLRVFGCTNYETKKIITVGEFRSMISDPNFATNDKIRMIEIMLPPRDVPQALLDRWVVEKEQSKQVQEENENSSAVNTPTPEFQPLLKKNQVGY

SEQ ID NO: 57 - protein, 15 aa, Artificial Sequence
  Synthetic Glycine Linker
GGGGGGGGGGGGGGG

SEQ ID NO: 58 - protein, 15 aa, Artificial Sequence
  Synthetic Glycine Serine Linker
GGGGSGGGGSGGGGS
